(19) United States
(12) Patent Application Publication
(10) Pub. No.: US 2021/0277409 A1
(43) Pub. Date: Sep. 9, 2021

(54) METHODS FOR SELECTING TRANSFORMED PLANTS

(71) Applicant: PIONEER HI-BRED INTERNATIONAL, INC., JOHNSTON, IA (US)

(72) Inventors: AJITH ANAND, WEST DES MOINES, IA (US); HYEON-JE CHO, ANKENY, IA (US); THEODORE M KLEIN, WILMINGTON, DE (US)

(73) Assignee: PIONEER HI-BRED INTERNATIONAL, INC., JOHNSTON, IA (US)

(21) Appl. No.: 17/255,132

(22) PCT Filed: Jun. 25, 2019
(86) PCT No.: PCT/US19/38972

§ 371 Date: Dec. 22, 2020

Related U.S. Application Data
(60) Provisional application No. 62/691,120, filed on Jun. 28, 2018.
(60) Provisional application No. 62/723,097, filed on Aug. 27, 2018.

(51) Int. Cl. C12N 15/82

(52) U.S. Cl. CPC C12N 15/8209

(57) ABSTRACT

Spectinomycin resistant or streptomycin resistant transgenic plants and methods of making such plants are provided.

### FIELD OF THE DISCLOSURE

[0001] The present disclosure relates generally to the field of plant molecular biology, including genetic manipulation of plants. More specifically, the present disclosure pertains to spectinomycin resistant or streptomycin resistant transgenic plants and methods of making and selecting such plants.

### CROSS-REFERENCE TO RELATED APPLICATIONS

[0002] This application claims the benefit of PCT Application Serial Number PCT/US2019/038972, filed Jun. 25, 2019, which claims the benefit of U.S. Provisional Application No. 62/691,120, filed Jun. 28, 2018 and U.S. Provisional Application No. 62/723,097, filed Aug. 27, 2018, which are hereby incorporated herein in their entireties by reference.

### REFERENCE TO A SEQUENCE LISTING SUBMITTED AS A TEXT FILE VIA EFS-WEB

[0003] The official copy of the sequence listing is submitted electronically via EFS-Web as an ASCII formatted sequence listing with a file named 7785-US-PCT_ST25, created on Dec. 19, 2020, and having a size of 775,607 bytes and is filed concurrently with the specification. The sequence listing contained in this ASCII formatted document is part of the specification and is herein incorporated by reference in its entirety.

### BACKGROUND

[0004] The use of standard transformation and regeneration protocols is time consuming and inefficient, and negatively impacts transgenic product development timelines, given that there is usually a seasonally limited “priority development window” for making decisions regarding which genetic constructs to prioritize for use in larger scale field work based on results obtained during initial research. The available standard methods of transformation and regeneration have multiple drawbacks that limit the speed and efficiency with which transgenic plants can be produced and screened. For example, many standard methods of transformation and regeneration require the use of high auxin or cytokinin levels and require steps involving either embryogenic callus formation or organogenesis, leading to procedures that take many weeks before producing plants for growth in a greenhouse setting following transformation. These methods can take 12-23 weeks to produce plants, which include the steps of supplying 2,4-D (auxin) to stimulate somatic embryo formation in corn (taking up to 8 weeks), production of embryogenic callus from the primary somatic embryos (taking up to an additional 8 weeks), forming shoots (taking up to an additional 3 weeks), and finally rooting (taking up to an additional 1 to 3 weeks). Other methods immediately supply a cytokinin along with the auxin to stimulate direct morphogenesis to produce shoots and direct plant formation in from 8 to 28 weeks after transformation. There remains a need for transformation methods that produce significantly higher transformation frequencies and significantly more quality events (events containing one copy of a trait gene cassette with no vector (plasmid) backbone) in multiple inbred lines using a variety of starting tissue types, including transformed inbreds representing a range of genetic diversities and having significant commercial utility.

### SUMMARY

[0005] The present disclosure comprises methods and compositions for producing transgenic plants that are spectinomycin resistant or streptomycin resistant. Methods of making and selecting such plants, and the transgenic plants so make are also provided.

[0006] In an aspect, the disclosure provides a plant transformed with a recombinant expression cassette comprising a marker gene cassette comprising a DNA sequence imparting spectinomycin resistance or streptomycin resistance in plants, wherein the DNA sequence comprises a nucleotide sequence selected from the group consisting of (a) at least one of SEQ ID NO: 9, SEQ ID NO: 11, SEQ ID NO: 13, SEQ ID NO: 15, SEQ ID NO: 21 and SEQ ID NO: 23, wherein the nucleotide sequence imparts spectinomycin resistance or streptomycin resistance in plants; (b) a nucleotide sequence that is at least 95% identical to at least one of SEQ ID NO: 9, SEQ ID NO: 11, SEQ ID NO: 13, SEQ ID NO: 15, SEQ ID NO: 21 and SEQ ID NO: 23, wherein the nucleotide sequence imparts spectinomycin resistance or streptomycin resistance in plants; (c) a nucleotide sequence that is at least 70% identical to at least one of SEQ ID NO: 9, SEQ ID NO: 11, SEQ ID NO: 13, SEQ ID NO: 15, SEQ ID NO: 21 and SEQ ID NO: 23, wherein the nucleotide sequence imparts spectinomycin resistance or streptomycin resistance in plants; (d) a nucleotide sequence encoding a polypeptide of at least one of SEQ ID NO: 10, SEQ ID NO: 12, SEQ ID NO: 14, SEQ ID NO: 16, SEQ ID NO: 22, and SEQ ID NO: 24, wherein the nucleotide sequence imparts spectinomycin resistance or streptomycin resistance in plants; (e) a nucleotide sequence encoding a polypeptide that is at least 95% identical to at least one of SEQ ID NO: 10, SEQ ID NO: 12, SEQ ID NO: 14, SEQ ID NO: 16, SEQ ID NO: 22, and SEQ ID NO: 24, wherein the nucleotide sequence imparts spectinomycin resistance or streptomycin resistance in plants; and (f) a nucleotide sequence encoding a polypeptide that is at least 70% identical to at least one of SEQ ID NO: 10, SEQ ID NO: 12, SEQ ID NO: 14, SEQ ID NO: 16, SEQ ID NO: 22, and SEQ ID NO: 24, wherein the nucleotide sequence imparts spectinomycin resistance or streptomycin resistance in plants. In a further aspect, the recombinant expression cassette further comprises a trait gene cassette comprising a heterologous nucleotide sequence of interest. In a further aspect, the heterologous nucleotide sequence of interest comprises a trait gene encoding a gene product conferring nutritional enhancement, pest resistance, herbicide resistance, abiotic stress tolerance, increased yield, drought resistance, cold tolerance, pathogen resistance, insect resistance, nitrogen use efficiency (NUE), disease resistance, or an ability to alter a metabolic pathway. In a further aspect, the recombinant expression cassette further comprises a morphogenic gene cassette comprising a morphogenic gene. In a further aspect, the morphogenic gene comprises: (i) a nucleotide sequence encoding a WUS/WOX homeobox polypeptide; or (ii) a nucleotide sequence encoding a Babyboom (BBM) polypeptide or an Ovule Development Protein 2 (ODP2) polypeptide; or (iii) a combination of (i) and (ii). In a further aspect, the morphogenic gene comprises the nucleotide sequence encoding the WUS/WOX homeobox polypeptide. In a further aspect, the nucleotide sequence encoding the WUS/WOX homeobox polypeptide is selected from WUS1, WUS2, WUS3, WOX2A, WOX4, WOX5, and WOX9. In a further aspect, the morphogenic gene comprises a nucleotide sequence encoding the Babyboom (BBM) polypeptide or the Ovule Development Protein 2 (ODP2) polypeptide. In a further aspect, the nucleotide sequence encoding the Babyboom (BBM) polypeptide is selected from BBM2, BMN2, and BMN3 or the Ovule Development Protein 2 (ODP2) polypeptide is ODP2. In a further aspect, the morphogenic gene comprises a nucleotide sequence encoding the WUS/WOX homeobox polypeptide and the Babyboom (BBM) polypeptide or the Ovule Development Protein 2 (ODP2) polypeptide. In a further aspect, the nucleotide sequence encoding the WUS/WOX homeobox polypeptide is selected from WUS1, WUS2, WUS3, WOX2A, WOX4, WOX5, and WOX9 and the Babyboom (BBM) polypeptide is selected from BBM2, BMN2, and BMN3 or the Ovule Development Protein 2 (ODP2) polypeptide is ODP2. In a further aspect, the recombinant expression cassette further comprises a site-specific recombinase cassette comprising a nucleotide sequence encoding a site-specific recombinase selected from FLP, Cre, SSV1, lambda Int, phi C31 Int, HK022, R, Gin, Tn1721, CinH, ParA, Tn5053, Bxbl, TP907-1, or U153. In a further aspect, the site-specific recombinase is operably linked to a constitutive promoter, an inducible promoter, or a developmentally regulated promoter. In a further aspect, the constitutive promoter is selected from UBI, LLDAV, EVCV, DMMV, BSV(AY) PRO, CYMV PRO FL, UBIZM PRO, SI-UB3 PRO, SB-UBI PRO (ALT1), USB1ZM PRO, ZM-GOS2 PRO, ZM-H1B PRO (1.2 KB), IN2-2, NOS, the −135 version of 35S, or ZM-ADF PRO (ALT2); the inducible promoter is selected from AXIG1, DR5, XVE, GLB1, OLE, LTP2, HSP17.7, HSP26, HSP18A, AT-HSP811, AT-HSP811L, GM-HSP173B or promoters activated by tetracycline, ethamethsulfuron or chlorsulfuron; and the developmentally regulated promoter is selected from PLTP, PLTP1, PLTP2, PLTP3, SDR, LGL, LEA-14A, or LEA-D34. In a further aspect, the morphogenic gene is operably linked to a constitutive promoter, an inducible promoter, or a developmentally regulated promoter. In a further aspect, the constitutive promoter is selected from UBI, LLDAV, EVCV, DMMV, BSV(AY) PRO, CYMV PRO FL, UBIZM PRO, SI-UB3 PRO, SB-UBI PRO (ALT1), USB1ZM PRO, ZM-GOS2 PRO, ZM-H1B PRO (1.2 KB), IN2-2, NOS, the −135 version of 35S, or ZM-ADF PRO (ALT2); the inducible promoter is selected from AXIG1, DR5, XVE, GLB1, OLE, LTP2, HSP17.7, HSP26, HSP18A, AT-HSP811, AT-HSP811L, GM-HSP173B or promoters activated by tetracycline, ethamethsulfuron or chlorsulfuron; and the developmentally regulated promoter is selected from PLTP, PLTP1, PLTP2, PLTP3, SDR, LGL, LEA-14A, or LEA-D34. In a further aspect, the plant is a monocot or a dicot. In a further aspect, the seed of the transformed plant comprises the trait gene cassette and not the marker gene cassette. In a further aspect, the seed of the transformed plant comprises the trait gene cassette and not the marker gene cassette or the morphogenic gene cassette. In a further aspect, the seed of the transformed plant comprises the trait gene cassette and not the marker gene cassette or the morphogenic gene cassette or the site-specific recombinase cassette.

[0007] In an aspect, the disclosure provides a method of producing a transgenic plant expressing a trait gene cassette comprising: transforming a plant cell with a recombinant expression cassette comprising a trait gene cassette and a marker gene cassette, the marker gene cassette comprising a DNA sequence imparting spectinomycin resistance or streptomycin resistance in plants, wherein the DNA sequence comprises a nucleotide sequence selected from the group consisting of: (a) at least one of SEQ ID NO: 9, SEQ ID NO: 11, SEQ ID NO: 13, SEQ ID NO: 15, SEQ ID NO: 21 and SEQ ID NO: 23, wherein the nucleotide sequence imparts spectinomycin resistance or streptomycin resistance in plants; (b) a nucleotide sequence that is at least 95% identical to at least one of SEQ ID NO: 9, SEQ ID NO: 11, SEQ ID NO: 13, SEQ ID NO: 15, SEQ ID NO: 21 and SEQ ID NO: 23, wherein the nucleotide sequence imparts spectinomycin resistance or streptomycin resistance in plants; (c) a nucleotide sequence that is at least 70% identical to at least one of SEQ ID NO: 9, SEQ ID NO: 11, SEQ ID NO: 13, SEQ ID NO: 15, SEQ ID NO: 21 and SEQ ID NO: 23, wherein the nucleotide sequence imparts spectinomycin resistance or streptomycin resistance in plants; (d) a nucleotide sequence encoding a polypeptide of at least one of SEQ ID NO: 10, SEQ ID NO: 12, SEQ ID NO: 14, SEQ ID NO: 16, SEQ ID NO: 22, and SEQ ID NO: 24, wherein the nucleotide sequence imparts spectinomycin resistance or streptomycin resistance in plants; (e) a nucleotide sequence encoding a polypeptide that is at least 95% identical to at least one of SEQ ID NO: 10, SEQ ID NO: 12, SEQ ID NO: 14, SEQ ID NO: 16, SEQ ID NO: 22, and SEQ ID NO: 24, wherein the nucleotide sequence imparts spectinomycin resistance or streptomycin resistance in plants; and (f) a nucleotide sequence encoding a polypeptide that is at least 70% identical to at least one of SEQ ID NO: 10, SEQ ID NO: 12, SEQ ID NO: 14, SEQ ID NO: 16, SEQ ID NO: 22, and SEQ ID NO: 24, wherein the nucleotide sequence imparts spectinomycin resistance or streptomycin resistance in plants; selecting a spectinomycin resistant or a streptomycin resistant transgenic plant cell; and regenerating the transgenic plant expressing the trait gene cassette. In a further aspect, the trait gene cassette comprises a heterologous nucleotide sequence of interest. In a further aspect, the heterologous nucleotide sequence of interest comprises a trait gene encoding a gene product conferring nutritional enhancement, pest resistance, herbicide resistance, abiotic stress tolerance, increased yield, drought resistance, cold tolerance, pathogen resistance, insect resistance, nitrogen use efficiency (NUE), disease resistance, or an ability to alter a metabolic pathway. In a further aspect, the recombinant expression cassette further comprises a morphogenic gene cassette. In a further aspect, the morphogenic gene cassette comprises a morphogenic gene. In a further aspect, the morphogenic gene comprises: (i) a nucleotide sequence encoding a WUS/WOX homeobox polypeptide; or (ii) a nucleotide sequence encoding a Babyboom (BBM) polypeptide or an Ovule Development Protein 2 (ODP2) polypeptide; or (iii) a combination of (i) and (ii). In a further aspect, the morphogenic gene comprises a nucleotide sequence encoding the WUS/WOX homeobox polypeptide. In a further aspect, the nucleotide sequence encoding the WUS/WOX homeobox polypeptide is selected from WUS1, WUS2, WUS3, WOX2A, WOX4, WOX5, and WOX9. In a further aspect, the morphogenic gene comprises a nucleotide sequence encoding the Babyboom (BBM) polypeptide or the Ovule Development Protein 2 (ODP2) polypeptide. In a further aspect, the nucleotide sequence encoding the Babyboom (BBM) polypeptide is selected from BBM2, BMN2, and BMN3 or the Ovule Development Protein 2 (ODP2) polypeptide is ODP2. In a further aspect, the morphogenic gene comprises a nucleotide sequence encoding the WUS/WOX homeobox polypeptide and the Babyboom (BBM) polypeptide or the Ovule Development Protein 2 (ODP2) polypeptide. In a further aspect, the nucleotide sequence encoding the WUS/WOX homeobox polypeptide is selected from WUS1, WUS2, WUS3, WOX2A, WOX4, WOX5, and WOX9 and the Babyboom (BBM) polypeptide is selected from BBM2, BMN2, and BMN3 or the Ovule Development Protein 2 (ODP2) polypeptide is ODP2. In a further aspect, the recombinant expression cassette further comprises a site-specific recombinase cassette. In a further aspect, the site-specific recombinase cassette comprises a nucleotide sequence encoding a site-specific recombinase selected from FLP, Cre, SSV1, lambda Int, phi C31 Int, HK022, R, Gin, Tn1721, CinH, ParA, Tn5053, Bxbl, TP907-1, or U153. In a further aspect, the nucleotide sequence encoding the site-specific recombinase is operably linked to a constitutive promoter, an inducible promoter, or a developmentally regulated promoter. In a further aspect, the constitutive promoter is selected from UBI, LLDAV, EVCV, DMMV, BSV(AY) PRO, CYMV PRO FL, UBIZM PRO, SI-UB3 PRO, SB-UBI PRO (ALT1), USB1ZM PRO, ZM-GOS2 PRO, ZM-H1B PRO (1.2 KB), IN2-2, NOS, the −135 version of 35S, or ZM-ADF PRO (ALT2); the inducible promoter is selected from AXIG1, DR5, XVE, GLB1, OLE, LTP2, HSP17.7, HSP26, HSP18A, AT-HSP811, AT-HSP811L, GM-HSP173B or promoters activated by tetracycline, ethamethsulfuron or chlorsulfuron; and the developmentally regulated promoter is selected from PLTP, PLTP1, PLTP2, PLTP3, SDR, LGL, LEA-14A, or LEA-D34. In a further aspect, the morphogenic gene is operably linked to a constitutive promoter, an inducible promoter, or a developmentally regulated promoter. In a further aspect, the constitutive promoter is selected from UBI, LLDAV, EVCV, DMMV, BSV(AY) PRO, CYMV PRO FL, UBIZM PRO, SI-UB3 PRO, SB-UBI PRO (ALT1), USB1ZM PRO, ZM-GOS2 PRO, ZM-H1B PRO (1.2 KB), IN2-2, NOS, the −135 version of 35S, or ZM-ADF PRO (ALT2); the inducible promoter is selected from AXIG1, DR5, XVE, GLB1, OLE, LTP2, HSP17.7, HSP26, HSP18A, AT-HSP811, AT-HSP811L, GM-HSP173B or promoters activated by tetracycline, ethamethsulfuron or chlorsulfuron; and the developmentally regulated promoter is selected from PLTP, PLTP1, PLTP2, PLTP3, SDR, LGL, LEA-14A, or LEA-D34. In a further aspect, the method further comprising excising or segregating away the marker gene cassette from the transgenic plant expressing the trait gene cassette. In a further aspect, the method further comprising excising or segregating away the marker gene cassette and the morphogenic gene cassette from the transgenic plant expressing the trait gene cassette. In a further aspect, the method further comprising excising or segregating away the marker gene cassette, the morphogenic gene cassette, and the site-specific recombinase cassette from the transgenic plant expressing the trait gene cassette. In a further aspect, the plant cell is a monocot or a dicot. In a further aspect, a seed from the transgenic plant produced by the method disclosed herein. In a further aspect, a seed of the transgenic plant produced by the method disclosed herein, wherein the seed comprises the trait gene cassette and not the marker gene cassette. In a further aspect, a seed of the transgenic plant produced by the method disclosed herein, wherein the seed comprises the trait gene cassette and not the marker gene cassette or the morphogenic gene cassette. In a further aspect, a seed of the transgenic plant produced by the method disclosed herein, wherein the seed comprises the trait gene cassette and not the marker gene cassette or the morphogenic gene cassette or the site-specific recombinase cassette. In a further aspect, the recombinant expression cassette resides in a disarmed Agrobacteria, an Ochrobactrum bacteria or a Rhizobiaceae bacteria. In a further aspect, the disarmed Agrobacteria is selected from the group of AGL-1, EHA105, GV3101, LBA4404, and LBA4404 THY-. In a further aspect, the Ochrobactrum bacteria is selected from Table 2. In a further aspect, the Rhizobiaceae bacteria is selected from Table 3.

### DETAILED DESCRIPTION

[0008] The disclosures herein will be described more fully hereinafter. Indeed, disclosures may be embodied in many different forms and should not be construed as limited to the aspects set forth herein; rather, these aspects are provided so that this disclosure will satisfy applicable legal requirements.

[0009] Many modifications and other aspects disclosed herein will come to mind to one skilled in the art to which the disclosed methods pertain having the benefit of the teachings presented in the following descriptions and the associated figures. Therefore, it is to be understood that the disclosures are not to be limited to the specific aspects disclosed and that modifications and other aspects are intended to be included within the scope of the appended claims. Although specific terms are employed herein, they are used in a generic and descriptive sense only and not for purposes of limitation.

[0010] The terminology used herein is for the purpose of describing particular aspects only and is not intended to be limiting. As used in the specification and in the claims, the term “comprising” can include the aspect of “consisting of.” Unless defined otherwise, all technical and scientific terms used herein have the same meaning as commonly understood by one of ordinary skill in the art to which the disclosed methods belong. In this specification and in the claims which follow, reference will be made to a number of terms which shall be defined herein.

[0011] The present disclosure comprises methods for producing a transgenic plant using a morphogenic gene. As used herein, the term “morphogenic gene” means a gene that when ectopically expressed stimulates formation of a somatically-derived structure that can produce a plant. More precisely, ectopic expression of the morphogenic gene stimulates the de novo formation of a somatic embryo or an organogenic structure, such as a shoot meristem, that can produce a plant. This stimulated de novo formation occurs either in the cell in which the morphogenic gene is expressed, or in a neighboring cell. A morphogenic gene can be a transcription factor that regulates expression of other genes, or a gene that influences hormone levels in a plant tissue, both of which can stimulate morphogenic changes. As used herein, the term “morphogenic factor” means a morphogenic gene and/or the protein expressed by a morphogenic gene.

[0012] A morphogenic gene is involved in plant metabolism, organ development, stem cell development, cell growth stimulation, organogenesis, somatic embryogenesis initiation, accelerated somatic embryo maturation, initiation and/or development of the apical meristem, initiation and/or development of shoot meristem, or a combination thereof, such as WUS/WOX genes (WUS1, WUS2, WUS3, WOX2A, WOX4, WOX5, or WOX9) see, U.S. Pat. Nos. 7,348,468 and 7,256,322 and US Patent Application Publication Numbers 2017/0121722 and 2007/0271628, herein incorporated by reference in their entirety; Laux et al. (1996) Development 122:87-96; and Mayer et al. (1998) Cell 95:805-815; van der Graaff et al., 2009, Genome Biology 10:248; Dolzblasz et al., 2016, Mol. Plant 19:1028-39. Modulation of WUS/WOX is expected to modulate plant and/or plant tissue phenotype including plant metabolism, organ development, stem cell development, cell growth stimulation, organogenesis, somatic embryogenesis initiation, accelerated somatic embryo maturation, initiation and/or development of the apical meristem, initiation and/or development of shoot meristem, or a combination thereof. Expression of Arabidopsis WUS can induce stem cells in vegetative tissues, which can differentiate into somatic embryos (Zuo, et al. (2002) Plant J 30:349-359). Also of interest in this regard would be a MYB118 gene (see U.S. Pat. No. 7,148,402), MYB115 gene (see Wang et al. (2008) Cell Research 224-235), a BABYBOOM gene (BBM; see Boutilier et al. (2002) Plant Cell 14:1737-1749), or a CLAVATA gene (see, for example, U.S. Pat. No. 7,179,963).

[0013] Morphogenic polynucleotide sequences and amino acid sequences of WUS/WOX homeobox polypeptides are useful in the disclosed methods. The Wuschel protein, designated hereafter as WUS, plays a key role in the initiation and maintenance of the apical meristem, which contains a pool of pluripotent stem cells (Endrizzi, et al., (1996) Plant Journal 10:967-979; Laux, et al., (1996) Development 122:87-96; and Mayer, et al., (1998) Cell 95:805-815). Arabidopsis plants mutant for the WUS gene contain stem cells that are misspecified and that appear to undergo differentiation. WUS encodes a novel homeodomain protein which presumably functions as a transcriptional regulator (Mayer, et al., (1998) Cell 95:805-815). The stem cell population of Arabidopsis shoot meristems is believed to be maintained by a regulatory loop between the CLAVATA (CLV) genes which promote organ initiation and the WUS gene which is required for stem cell identity, with the CLV genes repressing WUS at the transcript level, and WUS expression being sufficient to induce meristem cell identity and the expression of the stem cell marker CLV3 (Brand, et al., (2000) Science 289:617-619; Schoof, et al., (2000) Cell 100:635-644). Constitutive expression of WUS in Arabidopsis has been shown to lead to adventitious shoot proliferation from leaves (in planta) (Laux, T., Talk Presented at the XVI International Botanical Congress Meeting, Aug. 1-7, 1999, St. Louis, Mo.).

[0014] In an aspect, the WUS/WOX homeobox polypeptide useful in the methods of the disclosure is a WUS1, WUS2, WUS3, WOX2A, WOX4, WOX5, WOX5A, or WOX9 polypeptide (see, U.S. Pat. Nos. 7,348,468 and 7,256,322 and US Patent Application Publication Numbers 2017/0121722 and 2007/0271628, herein incorporated by reference in their entirety and van der Graaff et al., 2009, Genome Biology 10:248). The WUS/WOX homeobox polypeptide useful in the methods of the disclosure can be obtained from or derived from any of the plants described herein. Additional WUS/WOX genes useful in the present disclosure include, but are not limited to those disclosed in Table 1. The encoded WUS/WOX polypeptides are also listed in Table 1.

TABLE 1

| SEQ | Polynucleotide (DNA) | | |
|---|---|---|---|
| ID NO. | or Polypeptide (PRT) | Name | Description |
| 46 | DNA | AT-WUS | Arabidopsis thaliana WUS coding |
| | | | sequence |
| 47 | PRT | AT-WUS | Arabidopsis thaliana WUS protein |
| | | | sequence |
| 48 | DNA | LJ-WUS | Lotus japonicus WUS coding sequence |
| 49 | PRT | LJ-WUS | Lotus japonicus WUS protein sequence |
| 50 | DNA | GM-WUS | Glycine max WUS coding sequence |
| 51 | PRT | GM-WUS | Glycine max WUS protein sequence |
| 52 | DNA | CS-WUS | Camelina sativa WUS coding sequence |
| 53 | PRT | CS-WUS | Camelina sativa WUS protein sequence |
| 54 | DNA | CR-WUS | Capsella rubella WUS coding sequence |
| 55 | PRT | CR-WUS | Capsella rubella WUS protein sequence |
| 56 | DNA | AA-WUS | Arabis alpina WUS coding sequence |
| 57 | PRT | AA-WUS | Arabis alpina WUS protein sequence |
| 58 | DNA | RS-WUS | Raphanus sativus WUS coding sequence |
| 59 | PRT | RS-WUS | Raphanus sativus WUS protein sequence |
| 60 | DNA | BN-WUS | Brassica napus WUS coding sequence |
| 61 | PRT | BN-WUS | Brassica napus WUS protein sequence |
| 62 | DNA | BO-WUS | Brassica oleracea var. oleracea WUS |
| | | | coding sequence |
| 63 | PRT | BO-WUS | Brassica oleracea var. oleracea WUS |
| | | | protein sequence |
| 64 | DNA | HA-WUS | Helianthus annuus WUS coding |
| | | | sequence |
| 65 | PRT | HA-WUS | Helianthus annuus WUS protein |
| | | | sequence |
| 66 | DNA | PT-WUS | Populus trichocarpa WUS coding |
| | | | sequence |
| 67 | PRT | PT-WUS | Populus trichocarpa WUS protein |
| | | | sequence |
| 68 | DNA | VV-WUS | Vitis vinifera WUS coding sequence |
| 69 | PRT | VV-WUS | Vitis vinifera WUS protein sequence |
| 70 | DNA | AT-WUS | Arabidopsis thaliana WUS coding |
| | | | sequence (soy optimized) |
| 71 | PRT | AT-WUS | Arabidopsis thaliana WUS protein |
| | | | sequence |
| 72 | DNA | LJ-WUS | Lotus japonicus WUS coding sequence |
| | | | (soy optimized) |
| 73 | PRT | LJ-WUS | Lotus japonicus WUS protein sequence |
| 74 | DNA | MT-WUS | Medicago trunculata WUS coding |
| | | | sequence (soy optimized) |
| 75 | PRT | MT-WUS | Medicago trunculata WUS protein |
| | | | sequence |
| 76 | DNA | PH-WUS | Petunia hybrida WUS coding sequence |
| | | | (soy optimized) |
| 77 | PRT | PH-WUS | Petunia hybrida WUS protein sequence |
| 78 | DNA | PV-WUS | Phaseolus vulgaris WUS coding |
| | | | sequence (soy optimized) |
| 79 | PRT | PV-WUS | Phaseolus vulgaris WUS protein |
| | | | sequence |
| 80 | DNA | ZM-WUS1 | Zea mays WUS1 coding sequence |
| 81 | PRT | ZM-WUS1 | Zea mays WUS1 protein sequence |
| 82 | DNA | ZM-WUS2 | Zea mays WUS2 coding sequence |
| 83 | PRT | ZM-WUS2 | Zea mays WUS2 protein sequence |
| 84 | DNA | ZM-WUS3 | Zea mays WUS3 coding sequence |
| 85 | PRT | ZM-WUS3 | Zea mays WUS3 protein sequence |
| 86 | DNA | ZM-WOX2A | Zea mays WOX2A coding sequence |
| 87 | PRT | ZM-WOX2A | Zea mays WOX2A protein sequence |
| 88 | DNA | ZM-WOX4 | Zea mays WOX4 coding sequence |
| 89 | PRT | ZM-WOX4 | Zea mays WOX4 protein sequence |
| 90 | DNA | ZM-WOX5A | Zea mays WOX5A coding sequence |
| 91 | PRT | ZM-WOX5A | Zea mays WOX5A protein sequence |
| 92 | DNA | ZM-WOX9 | Zea mays WOX9 coding sequence |
| 93 | PRT | ZM-WOX9 | Zea mays WOX9 protein sequence |
| 94 | DNA | GG- WUS | Gnetum gnemon WUS coding sequence |
| 95 | PRT | GG- WUS | Gnetum gnemon WUS protein sequence |
| 96 | DNA | MD-WUS | Malus domestica WUS coding sequence |
| 97 | PRT | MD-WUS | Malus domestica WUS protein sequence |
| 98 | DNA | ME-WUS | Manihot esculenta WUS coding sequence |
| 99 | PRT | ME-WUS | Manihot esculenta WUS protein |
| | | | sequence |
| 100 | DNA | KF-WUS | Kalanchoe fedtschenkoi WUS coding |
| | | | sequence |
| 101 | PRT | KF-WUS | Kalanchoe fedtschenkoi WUS protein |
| | | | sequence |
| 102 | DNA | GH-WUS | Gossypium hirsutum WUS coding |
| | | | sequence |
| 103 | PRT | GH-WUS | Gossypium hirsutum WUS protein |
| | | | sequence |
| 104 | DNA | ZOSMA-WUS | Zostera marina WUS coding sequence |
| 105 | PRT | ZOSMA-WUS | Zostera marina WUS protein sequence |
| 106 | DNA | AMBTR-WUS | Amborella trichopoda WUS coding |
| | | | sequence |
| 107 | PRT | AMBTR-WUS | Amborella trichopoda WUS protein |
| | | | sequence |
| 108 | DNA | AC-WUS | Aquilegia coerulea WUS coding |
| | | | sequence |
| 109 | PRT | AC-WUS | Aquilegia coerulea WUS protein |
| | | | sequence |
| 110 | DNA | AH-WUS | Amaranthus hypochondriacus WUS |
| | | | coding sequence |
| 111 | PRT | AH-WUS | Amaranthus hypochondriacus WUS |
| | | | protein sequence |
| 112 | DNA | CUCSA-WUS | Cucumis sativus WUS coding sequence |
| 113 | PRT | CUCSA -WUS | Cucumis sativus WUS protein sequence |
| 114 | DNA | PINTA-WUS | Pinus taeda WUS coding sequence |
| 115 | PRT | PINTA-WUS | Pinus taeda WUS protein sequence |

[0015] Other morphogenic genes useful in the present disclosure include, but are not limited to, LEC1 (U.S. Pat. No. 6,825,397 incorporated herein by reference in its entirety, Lotan et al., 1998, Cell 93:1195-1205), LEC2 (Stone et al., 2008, PNAS 105:3151-3156; Belide et al., 2013, Plant Cell Tiss. Organ Cult 113:543-553), KN1/STM (Sinha et al., 1993. Genes Dev 7:787-795), the IPT gene from Agrobacterium (Ebinuma and Komamine, 2001, In vitro Cell. Dev Biol—Plant 37:103-113), MONOPTEROS-DELTA (Ckurshumova et al., 2014, New Phytol. 204:556-566), the Agrobacterium AV-6b gene (Wabiko and Minemura 1996, Plant Physiol. 112:939-951), the combination of the Agrobacterium IAA-h and IAA-m genes (Endo et al., 2002, Plant Cell Rep., 20:923-928), the Arabidopsis SERK gene (Hecht et al., 2001, Plant Physiol. 127:803-816), the Arabiopsis AGL15 gene (Harding et al., 2003, Plant Physiol. 133:653-663), the FUSCA gene (Castle and Meinke, Plant Cell 6:25-41), and the PICKLE gene (Ogas et al., 1999, PNAS 96:13839-13844). Any of these morphogenic genes may also be combined with any of the WUS/WOX genes described herein.

[0016] As used herein, the term “transcription factor” means a protein that controls the rate of transcription of specific genes by binding to the DNA sequence of the promoter and either up-regulating or down-regulating expression. Examples of transcription factors, which are also morphogenic genes, include members of the AP2/EREBP family (including the BBM (ODP2), plethora and aintegumenta sub-families, CAAT-box binding proteins such as LEC1 and HAP3, and members of the MYB, bHLH, NAC, MADS, bZIP and WRKY families.

[0017] Morphogenic polynucleotide sequences and amino acid sequences of Ovule Development Protein 2 (ODP2) polypeptides, and related polypeptides, e.g., Babyboom (BBM) protein family proteins are useful in the methods of the disclosure. In an aspect, a polypeptide comprising two AP2-DNA binding domains is an ODP2, BBM2, BMN2, or BMN3 polypeptide see, US Patent Application Publication Number 2017/0121722, herein incorporated by reference in its entirety. ODP2 polypeptides useful in the methods of the disclosure contain two predicted APETALA2 (AP2) domains and are members of the AP2 protein family (PFAM Accession PF00847). The AP2 family of putative transcription factors has been shown to regulate a wide range of developmental processes, and the family members are characterized by the presence of an AP2 DNA binding domain. This conserved core is predicted to form an amphipathic alpha helix that binds DNA. The AP2 domain was first identified in APETALA2, an Arabidopsis protein that regulates meristem identity, floral organ specification, seed coat development, and floral homeotic gene expression. The AP2 domain has now been found in a variety of proteins.

[0018] ODP2 polypeptides useful in the methods of the disclosure share homology with several polypeptides within the AP2 family, e.g., see FIG. 1 of U.S. Pat. No. 8,420,893, which is incorporated herein by reference in its entirety, provides an alignment of the maize and rice ODP2 polypeptides with eight other proteins having two AP2 domains. A consensus sequence of all proteins appearing in the alignment of U.S. Pat. No. 8,420,893 is also provided in FIG. 1 therein. The polypeptide comprising the two AP2-DNA binding domains useful in the methods of the disclosure can be obtained from or derived from any of the plants described herein. In an aspect, the polypeptide comprising the two AP2-DNA binding domains useful in the methods of the disclosure is an ODP2 polypeptide. In an aspect, the polypeptide comprising the two AP2-DNA binding domains useful in the methods of the disclosure is a BBM2 polypeptide. The ODP2 polypeptide and the BBM2 polypeptide useful in the methods of the disclosure can be obtained from or derived from any of the plants described herein.

[0019] A morphogenic gene may be stably incorporated into the genome of a plant or it may be transiently expressed. In an aspect, expression of the morphogenic gene is controlled. The controlled expression may be a pulsed expression of the morphogenic gene for a particular period of time. Alternatively, the morphogenic gene may be expressed in only some transformed cells and not expressed in others. The control of expression of the morphogenic gene can be achieved by a variety of methods as disclosed herein below. The morphogenic genes useful in the methods of the disclosure may be obtained from or derived from any plant species described herein. Methods of regulating expression can be found in U.S. Pat. No. 9,765,352 incorporated herein by reference in its entirety.

[0020] The term “plant” refers to whole plants, plant organs (e.g., leaves, stems, roots, etc.), plant tissues, plant cells, plant parts, seeds, propagules, embryos and progeny of the same. Plant cells can be differentiated or undifferentiated (e.g. callus, undifferentiated callus, immature and mature embryos, immature zygotic embryo, immature cotyledon, embryonic axis, suspension culture cells, protoplasts, leaf, leaf cells, root cells, phloem cells and pollen). Plant cells include, without limitation, cells from seeds, suspension cultures, explants, immature embryos, embryos, zygotic embryos, somatic embryos, embryogenic callus, meristem, somatic meristems, organogenic callus, protoplasts, embryos derived from mature ear-derived seed, leaf bases, leaves from mature plants, leaf tips, immature influorescences, tassel, immature ear, silks, cotyledons, immature cotyledons, embryonic axes, meristematic regions, callus tissue, cells from leaves, cells from stems, cells from roots, cells from shoots, gametophytes, sporophytes, pollen and microspores. Plant parts include differentiated and undifferentiated tissues including, but not limited to, roots, stems, shoots, leaves, pollen, seeds, tumor tissue and various forms of cells in culture (e.g., single cells, protoplasts, embryos, and callus tissue). The plant tissue may be in a plant or in a plant organ, tissue, or cell culture. Grain is intended to mean the mature seed produced by commercial growers for purposes other than growing or reproducing the species. Progeny, variants and mutants of the regenerated plants are also included within the scope of the disclosure, provided these progeny, variants and mutants comprise the introduced polynucleotides.

[0021] The present disclosure may be used for transformation of any plant species, including, but not limited to, monocots and dicots. Monocots include, but are not limited to, barley, maize (corn), millet (e.g., pearl millet (Pennisetum glaucum), proso millet (Panicum miliaceum), foxtail millet (Setaria italica), finger millet (Eleusine coracana), teff (Eragrostis tef), oats, rice, rye, Setaria sp., sorghum, triticale, or wheat, or leaf and stem crops, including, but not limited to, bamboo, marram grass, meadow-grass, reeds, ryegrass, sugarcane; lawn grasses, ornamental grasses, and other grasses such as switchgrass and turf grass. Alternatively, dicot plants used in the present disclosure, include, but are not limited to, kale, cauliflower, broccoli, mustard plant, cabbage, pea, clover, alfalfa, broad bean, tomato, peanut, cassava, soybean, canola, alfalfa, sunflower, safflower, tobacco, Arabidopsis, or cotton.

[0022] Examples of plant species of interest include, but are not limited to, corn (Zea mays), Brassica sp. (e.g., B. napus, B. rapa, B. juncea), particularly those Brassica species useful as sources of seed oil, alfalfa (Medicago sativa), rice (Oryza sativa), rye (Secale cereale), sorghum (Sorghum bicolor, Sorghum vulgare), millet (e.g., pearl millet (Pennisetum glaucum), proso millet (Panicum miliaceum), foxtail millet (Setaria italica), finger millet (Eleusine coracana)), sunflower (Helianthus annuus), safflower (Carthamus tinctorius), wheat (Triticum aestivum), soybean (Glycine max), tobacco (Nicotiana tabacum), potato (Solanum tuberosum), peanuts (Arachis hypogaea), cotton (Gossypium barbadense, Gossypium hirsutum), sweet potato (Ipomoea batatus), cassava (Manihot esculenta), coffee (Coffea spp.), coconut (Cocos nucifera), pineapple (Ananas comosus), citrus trees (Citrus spp.), cocoa (Theobroma cacao), tea (Camellia sinensis), banana (Musa spp.), avocado (Persea americana), fig (Ficus casica), guava (Psidium guajava), mango (Mangifera indica), olive (Olea europaea), papaya (Carica papaya), cashew (Anacardium occidentale), macadamia (Macadamia integrifolia), almond (Prunus amygdalus), sugar beets (Beta vulgaris), sugarcane (Saccharum spp.), oats, barley, vegetables, ornamentals, and conifers.

[0023] Higher plants, e.g., classes of Angiospermae and Gymnospermae may be used the present disclosure. Plants of suitable species useful in the present disclosure may come from the family Acanthaceae, Alliaceae, Alstroemeriaceae, Amaryllidaceae, Apocynaceae, Arecaceae, Asteraceae, Berberidaceae, Bixaceae, Brassicaceae, Bromeliaceae, Cannabaceae, Caryophyllaceae, Cephalotaxaceae, Chenopodiaceae, Colchicaceae, Cucurbitaceae, Dioscoreaceae, Ephedraceae, Erythroxylaceae, Euphorbiaceae, Fabaceae, Lamiaceae, Linaceae, Lycopodiaceae, Malvaceae, Melanthiaceae, Musaceae, Myrtaceae, Nyssaceae, Papaveraceae, Pinaceae, Plantaginaceae, Poaceae, Rosaceae, Rubiaceae, Salicaceae, Sapindaceae, Solanaceae, Taxaceae, Theaceae, and Vitaceae. Plants from members of the genus Abelmoschus, Abies, Acer, Agrostis, Allium, Alstroemeria, Ananas, Andrographis, Andropogon, Artemisia, Arundo, Atropa, Berberis, Beta, Bixa, Brassica, Calendula, Camellia, Camptotheca, Cannabis, Capsicum, Carthamus, Catharanthus, Cephalotaxus, Chrysanthemum, Cinchona, Citrullus, Coffea, Colchicum, Coleus, Cucumis, Cucurbita, Cynodon, Datura, Dianthus, Digitalis, Dioscorea, Elaeis, Ephedra, Erianthus, Erythroxylum, Eucalyptus, Festuca, Fragaria, Galanthus, Glycine, Gossypium, Helianthus, Hevea, Hordeum, Hyoscyamus, Jatropha, Lactuca, Linum, Lolium, Lupinus, Lycopersicon, Lycopodium, Manihot, Medicago, Mentha, Miscanthus, Musa, Nicotiana, Oryza, Panicum, Papaver, Parthenium, Pennisetum, Petunia, Phalaris, Phleum, Pinus, Poa, Poinsettia, Populus, Rauwolfia, Ricinus, Rosa, Saccharum, Salix, Sanguinaria, Scopolia, Secale, Solanum, Sorghum, Spartina, Spinacea, Tanacetum, Taxus, Theobroma, Triticosecale, Triticum, Uniola, Veratrum, Vinca, Vitis, and Zea may be used in the methods of the disclosure.

[0024] Plants important or interesting for agriculture, horticulture, biomass production (for production of liquid fuel molecules and other chemicals), and/or forestry may be used in the methods of the disclosure. Non-limiting examples include, for instance, Panicum virgatum (switchgrass), Miscanthus giganteus (miscanthus), Saccharum spp. (sugarcane, energycane), Populus balsamifera (poplar), cotton (Gossypium barbadense, Gossypium hirsutum), Helianthus annuus (sunflower), Medicago sativa (alfalfa), Beta vulgaris (sugarbeet), sorghum (Sorghum bicolor, Sorghum vulgare), Erianthus spp., Andropogon gerardii (big bluestem), Pennisetum purpureum (elephant grass), Phalaris arundinacea (reed canarygrass), Cynodon dactylon (bermudagrass), Festuca arundinacea (tall fescue), Spartina pectinata (prairie cord-grass), Arundo donax (giant reed), Secale cereale (rye), Salix spp. (willow), Eucalyptus spp. (eucalyptus, including E. grandis (and its hybrids, known as “urograndis”), E. globulus, E. camaldulensis, E. tereticornis, E. viminalis, E. nitens, E. saligna and E. urophylla), Triticosecale spp. (triticum—wheat X rye), teff (Eragrostis tef), Bamboo, Carthamus tinctorius (safflower), Jatropha curcas (jatropha), Ricinus communis (castor), Elaeis guineensis (palm), Linum usitatissimum (flax), Manihot esculenta (cassava), Lycopersicon esculentum (tomato), Lactuca sativa (lettuce), Phaseolus vulgaris (green beans), Phaseolus limensis (lima beans), Lathyrus spp. (peas), Musa paradisiaca (banana), Solanum tuberosum (potato), Brassica spp. (B. napus (canola), B. rapa, B. juncea), Brassica oleracea (broccoli, cauliflower, brussel sprouts), Camellia sinensis (tea), Fragaria ananassa (strawberry), Theobroma cacao (cocoa), Coffea arabica (coffee), Vitis vinifera (grape), Ananas comosus (pineapple), Capsicum annum (hot & sweet pepper), Arachis hypogaea (peanuts), Ipomoea batatus (sweet potato), Cocos nucifera (coconut), Citrus spp. (citrus trees), Persea americana (avocado), fig (Ficus casica), guava (Psidium guajava), mango (Mangifera indica), olive (Olea europaea), Carica papaya (papaya), Anacardium occidentale (cashew), Macadamia integrifolia (macadamia tree), Prunus amygdalus (almond), Allium cepa (onion), Cucumis melo (musk melon), Cucumis sativus (cucumber), Cucumis cantalupensis (cantaloupe), Cucurbita maxima (squash), Cucurbita moschata (squash), Spinacea oleracea (spinach), Citrullus lanatus (watermelon), Abelmoschus esculentus (okra), Solanum melongena (eggplant), Cyamopsis tetragonoloba (guar bean), Ceratonia siliqua (locust bean), Trigonella foenum-graecum (fenugreek), Vigna radiata (mung bean), Vigna unguiculata (cowpea), Vicia faba (fava bean), Cicer arietinum (chickpea), Lens culinaris (lentil), Papaver somniferum (opium poppy), Papaver orientale, Taxus baccata, Taxus brevifolia, Artemisia annua, Cannabis sativa, Camptotheca acuminate, Catharanthus roseus, Vinca rosea, Cinchona officinalis, Colchicum autumnale, Veratrum californica., Digitalis lanata, Digitalis purpurea, Dioscorea spp., Andrographis paniculata, Atropa belladonna, Datura stomonium, Berberis spp., Cephalotaxus spp., Ephedra sinica, Ephedra spp., Erythroxylum coca, Galanthus wornorii, Scopolia spp., Lycopodium serratum (Huperzia serrata), Lycopodium spp., Rauwolfia serpentina, Rauwolfia spp., Sanguinaria canadensis, Hyoscyamus spp., Calendula officinalis, Chrysanthemum parthenium, Coleus forskohlii, Tanacetum parthenium, Parthenium argentatum (guayule), Hevea spp. (rubber), Mentha spicata (mint), Mentha piperita (mint), Bixa orellana (achiote), Alstroemeria spp., Rosa spp. (rose), Rhododendron spp. (azalea), Macrophylla hydrangea (hydrangea), Hibiscus rosasanensis (hibiscus), Tulipa spp. (tulips), Narcissus spp. (daffodils), Petunia hybrida (petunias), Dianthus caryophyllus (carnation), Euphorbia pulcherrima (poinsettia), chrysanthemum, Nicotiana tabacum (tobacco), Lupinus albus (lupin), Uniola paniculata (oats), bentgrass (Agrostis spp.), Populus tremuloides (aspen), Pinus spp. (pine), Abies spp. (fir), Acer spp. (maple), Hordeum vulgare (barley), Poa pratensis (bluegrass), Lolium spp. (ryegrass), Phleum pratense (timothy), and conifers.

[0025] Conifers may be used in the present disclosure and include, for example, pines such as loblolly pine (Pinus taeda), slash pine (Pinus elliotii), ponderosa pine (Pinus ponderosa), lodgepole pine (Pinus contorta), and Monterey pine (Pinus radiata); Douglas-fir (Pseudotsuga menziesii); Eastern or Canadian hemlock (Tsuga canadensis); Western hemlock (Tsuga heterophylla); Mountain hemlock (Tsuga mertensiana); Tamarack or Larch (Larix occidentalis); Sitka spruce (Picea glauca); redwood (Sequoia sempervirens); true firs such as silver fir (Abies amabilis) and balsam fir (Abies balsamea); and cedars such as Western red cedar (Thuja plicata) and Alaska yellow-cedar (Chamaecyparis nootkatensis).

[0026] Turf grasses may be used in the present disclosure and include, but are not limited to: annual bluegrass (Poa annua); annual ryegrass (Lolium multiflorum); Canada bluegrass (Poa compressa); colonial bentgrass (Agrostis tenuis); creeping bentgrass (Agrostis palustris); crested wheatgrass (Agropyron desertorum); fairway wheatgrass (Agropyron cristatum); hard fescue (Festuca longifolia); Kentucky bluegrass (Poa pratensis); orchardgrass (Dactylis glomerata); perennial ryegrass (Lolium perenne); red fescue (Festuca rubra); redtop (Agrostis alba); rough bluegrass (Poa trivialis); sheep fescue (Festuca ovina); smooth bromegrass (Bromus inermis); timothy (Phleum pratense); velvet bentgrass (Agrostis canina); weeping alkaligrass (Puccinellia distans); western wheatgrass (Agropyron smithii); St. Augustine grass (Stenotaphrum secundatum); zoysia grass (Zoysia spp.); Bahia grass (Paspalum notatum); carpet grass (Axonopus affinis); centipede grass (Eremochloa ophiuroides); kikuyu grass (Pennisetum clandesinum); seashore paspalum (Paspalum vaginatum); blue gramma (Bouteloua gracilis); buffalo grass (Buchloe dactyloids); sideoats gramma (Bouteloua curtipendula).

In specific aspects, plants transformed by the methods of the present disclosure are crop plants (for example, corn, alfalfa, sunflower, Brassica, soybean, cotton, safflower, peanut, rice. sorghum, wheat, millet, tobacco, etc.). Plants of particular interest include grain plants that provide seeds of interest, oil-seed plants, and leguminous plants. Seeds of interest include grain seeds, such as corn, wheat, barley, rice, sorghum, rye, etc. Oil-seed plants include cotton, soybean, safflower, sunflower, Brassica, maize, alfalfa, palm, coconut, etc. Leguminous plants include, but are not limited to, beans and peas. Beans include, but are not limited to, guar, locust bean, fenugreek, soybean, garden beans, cowpea, mungbean, lima bean, fava bean, lentils, and chickpea.

[0027] The present disclosure also includes plants obtained by any of the disclosed methods herein. The present disclosure also includes seeds from a plant obtained by any of the disclosed methods herein. A transgenic plant is defined as a mature, fertile plant that contains a transgene. In the disclosed methods, various plant-derived explants can be used, including immature embryos, 1-5 mm zygotic embryos, 3-5 mm embryos, and embryos derived from mature ear-derived seed, leaf bases, leaves from mature plants, leaf tips, immature influorescences, tassel, immature ear, and silks. In an aspect, the explants used in the disclosed methods can be derived from mature ear-derived seed, leaf bases, leaves from mature plants, leaf tips, immature influorescences, tassel, immature ear, and silks. The explant used in the disclosed methods can be derived from any of the plants described herein.

[0028] The disclosure encompasses isolated or substantially purified nucleic acid compositions. An “isolated” or “purified” nucleic acid molecule or protein or a biologically active portion thereof is substantially free of other cellular material or components that normally accompany or interact with the nucleic acid molecule or protein as found in its naturally occurring environment or is substantially free of culture medium when produced by recombinant techniques or substantially free of chemical precursors or other chemicals when chemically synthesized. An “isolated” nucleic acid is substantially free of sequences (including protein encoding sequences) that naturally flank the nucleic acid (i.e., sequences located at the 5′ and 3′ ends of the nucleic acid) in the genomic DNA of the organism from which the nucleic acid is derived. For example, in various aspects, an isolated nucleic acid molecule can contain less than about 5 kb, 4 kb, 3 kb, 2 kb, 1 kb, 0.5 kb or 0.1 kb of nucleotide sequences that naturally flank the nucleic acid molecule in genomic DNA of the cell from which the nucleic acid is derived. A protein that is substantially free of cellular material includes preparations of protein having less than about 30%, 20%, 10%, 5%, or 1% (by dry weight) of contaminating protein. When a protein useful in the methods of the disclosure or biologically active portion thereof is recombinantly produced, optimally culture medium represents less than about 30%, 20%, 10%, 5%, or 1% (by dry weight) of chemical precursors or non-protein-of-interest chemicals. Sequences useful in the methods of the disclosure may be isolated from the 5′ untranslated region flanking their respective transcription initiation sites. The present disclosure encompasses isolated or substantially purified nucleic acid or protein compositions useful in the methods of the disclosure.

[0029] As used herein, the term “fragment” refers to a portion of the nucleic acid sequence. Fragments of sequences useful in the methods of the disclosure retain the biological activity of the nucleic acid sequence. Alternatively, fragments of a nucleotide sequence that are useful as hybridization probes may not necessarily retain biological activity. Fragments of a nucleotide sequence disclosed herein may range from at least about 20, 25, 50, 75, 100, 125, 150, 175, 200, 225, 250, 275, 300, 325, 350, 375, 400, 425, 450, 475, 500, 525, 550, 575, 600, 625, 650, 675, 700, 725, 750, 775, 800, 825, 850, 875, 900, 925, 950, 975, 1000, 1025, 1050, 1075, 1100, 1125, 1150, 1175, 1200, 1225, 1250, 1275, 1300, 1325, 1350, 1375, 1400, 1425, 1450, 1475, 1500, 1525, 1550, 1575, 1600, 1625, 1650, 1675, 1700, 1725, 1750, 1775, 1800, 1825, 1850, 1875, 1900, 1925, 1950, 1975, 2000, 2025, 2050, 2075, 2100, 2125, 2150, 2175, 2200, 2225, 2250, 2275, 2300, 2325, 2350, 2375, 2400, 2425, 2450, 2475, 2500, 2525, 2550, 2575, 2600, 2625, 2650, 2675, 2700, 2725, 2750, 2775, 2800, 2825, 2850, 2875, 2900, 2925, 2950, 2975, 3000, 3025, 3050, 3075, 3100, 3125, 3150, 3175, 3200, 3225, 3250, 3275, 3300, 3325, 3350, 3375, 3400, 3425, 3450, 3475, 3500, 3525, 3550, 3575, 3600, 3625, 3650, 3675, 3700, 3725, 3750, 3775, 3800, 3825, 3850, 3875, 3900, 3925, 3950, 3975, 4000, 4025, 4050, 4075, 4100, 4125, 4150, 4175, 4200, 4225, 4250, 4275, 4300, 4325, 4350, 4375, 4400, 4425, 4450, 4475, 4500, 4525, 4550, 4575, 4600, 4625, 4650, 4675, 4700, 4725, 4750, 4775, 4800, 4825, 4850, 4875, 4900, 4925, 4950, 4975, 5000, 5025, 5050, 5075, 5100, 5125, 5150, 5175, 5200, 5225, 5250, 5275, 5300, 5325, 5350, 5375, 5400, 5425, 5450, 5475, 5500, 5525, 5550, 5575, 5600, 5625, 5650, 5675, 5700, 5725, 5750, 5775, 5800, 5825, 5850, 5875, 5900, 5925, 5950, 5975, 6000, 6025, 6050, 6075, 6100, 6125, 6150, 6175, 6200, or 6225 nucleotides, and up to the full length of the subject sequence. A biologically active portion of a nucleotide sequence can be prepared by isolating a portion of the sequence, and assessing the activity of the portion.

[0030] Fragments and variants of nucleotide sequences and the proteins encoded thereby useful in the methods of the present disclosure are also encompassed. As used herein, the term “fragment” refers to a portion of a nucleotide sequence and hence the protein encoded thereby or a portion of an amino acid sequence. Fragments of a nucleotide sequence may encode protein fragments that retain the biological activity of the native protein. Alternatively, fragments of a nucleotide sequence useful as hybridization probes generally do not encode fragment proteins retaining biological activity. Thus, fragments of a nucleotide sequence may range from at least about 20 nucleotides, about 50 nucleotides, about 100 nucleotides, and up to the full-length nucleotide sequence encoding the proteins useful in the methods of the disclosure.

[0031] As used herein, the term “variants” is means sequences having substantial similarity with a sequence disclosed herein. A variant comprises a deletion and/or addition of one or more nucleotides or peptides at one or more internal sites within the native polynucleotide or polypeptide and/or a substitution of one or more nucleotides or peptides at one or more sites in the native polynucleotide or polypeptide. As used herein, a “native” nucleotide or peptide sequence comprises a naturally occurring nucleotide or peptide sequence, respectively. For nucleotide sequences, naturally occurring variants can be identified with the use of well-known molecular biology techniques, such as, for example, with polymerase chain reaction (PCR) and hybridization techniques as outlined herein. A biologically active variant of a protein useful in the methods of the disclosure may differ from that native protein by as few as 1-15 amino acid residues, as few as 1-10, such as 6-10, as few as 5, as few as 4, 3, 2, or even 1 amino acid residue.

[0032] Variant nucleotide sequences also include synthetically derived nucleotide sequences, such as those generated, for example, by using site-directed mutagenesis. Generally, variants of a nucleotide sequence disclosed herein will have at least 40%, 50%, 60%, 65%, 70%, 75%, 80%, 85%, 90%, 91%, 92%, 93%, 94%, to 95%, 96%, 97%, 98%, 99% or more sequence identity to that nucleotide sequence as determined by sequence alignment programs described elsewhere herein using default parameters. Biologically active variants of a nucleotide sequence disclosed herein are also encompassed. Biological activity may be measured by using techniques such as Northern blot analysis, reporter activity measurements taken from transcriptional fusions, and the like. See, for example, Sambrook, et al., (1989) Molecular Cloning: A Laboratory Manual (2d ed., Cold Spring Harbor Laboratory Press, Cold Spring Harbor, N.Y.), hereinafter “Sambrook,” herein incorporated by reference in its entirety. Alternatively, levels of a reporter gene such as green fluorescent protein (GFP) or yellow fluorescent protein (YFP) or the like produced under the control of a promoter operably linked to a nucleotide fragment or variant can be measured. See, for example, Matz et al. (1999) Nature Biotechnology 17:969-973; U.S. Pat. No. 6,072,050, herein incorporated by reference in its entirety; Nagai, et al., (2002) Nature Biotechnology 20(1):87-90. Variant nucleotide sequences also encompass sequences derived from a mutagenic and recombinogenic procedure such as DNA shuffling. With such a procedure, one or more different nucleotide sequences can be manipulated to create a new nucleotide sequence. In this manner, libraries of recombinant polynucleotides are generated from a population of related sequence polynucleotides comprising sequence regions that have substantial sequence identity and can be homologously recombined in vitro or in vivo. Strategies for such DNA shuffling are known in the art. See, for example, Stemmer, (1994) Proc. Natl. Acad. Sci. USA 91:10747-10751; Stemmer, (1994) Nature 370:389 391; Crameri, et al., (1997) Nature Biotech. 15:436-438; Moore, et al., (1997) J. Mol. Biol. 272:336-347; Zhang, et al., (1997) Proc. Natl. Acad. Sci. USA 94:4504-4509; Crameri, et al., (1998) Nature 391:288-291 and U.S. Pat. Nos. 5,605,793 and 5,837,458, herein incorporated by reference in their entirety.

[0033] Methods for mutagenesis and nucleotide sequence alterations are well known in the art. See, for example, Kunkel, (1985) Proc. Natl. Acad. Sci. USA 82:488-492; Kunkel, et al., (1987) Methods in Enzymol. 154:367-382; U.S. Pat. No. 4,873,192; Walker and Gaastra, eds. (1983) Techniques in Molecular Biology (MacMillan Publishing Company, New York) and the references cited therein, herein incorporated by reference in their entirety. Guidance as to appropriate amino acid substitutions that do not affect biological activity of the protein of interest may be found in the model of Dayhoff et al. (1978) Atlas of Protein Sequence and Structure (Natl. Biomed. Res. Found., Washington, D.C.), herein incorporated by reference. Conservative substitutions, such as exchanging one amino acid with another having similar properties, may be optimal.

[0034] The nucleotide sequences of the disclosure can be used to isolate corresponding sequences from other organisms, particularly other plants, more particularly other monocots or dicots. In this manner, methods such as PCR, hybridization and the like can be used to identify such sequences based on their sequence homology to the sequences set forth herein. Sequences isolated based on their sequence identity to the entire sequences set forth herein or to fragments thereof are encompassed by the present disclosure.

[0035] In a PCR approach, oligonucleotide primers can be designed for use in PCR reactions to amplify corresponding DNA sequences from cDNA or genomic DNA extracted from any plant of interest. Methods for designing PCR primers and PCR cloning are generally known in the art and are disclosed in, Sambrook, supra. See also, Innis, et al., eds. (1990) PCR Protocols: A Guide to Methods and Applications (Academic Press, New York); Innis and Gelfand, eds. (1995) PCR Strategies (Academic Press, New York); and Innis and Gelfand, eds. (1999) PCR Methods Manual (Academic Press, New York), herein incorporated by reference in their entirety. Known methods of PCR include, but are not limited to, methods using paired primers, nested primers, single specific primers, degenerate primers, gene-specific primers, vector-specific primers, partially-mismatched primers and the like.

[0036] In hybridization techniques, all or part of a known nucleotide sequence is used as a probe that selectively hybridizes to other corresponding nucleotide sequences present in a population of cloned genomic DNA fragments or cDNA fragments (i.e., genomic or cDNA libraries) from a chosen organism. The hybridization probes may be genomic DNA fragments, cDNA fragments, RNA fragments, or other oligonucleotides and may be labeled with a detectable group such as 32P or any other detectable marker. Thus, for example, probes for hybridization can be made by labeling synthetic oligonucleotides based on the sequences of the disclosure. Methods for preparation of probes for hybridization and for construction of genomic libraries are generally known in the art and are disclosed in Sambrook, supra.

[0037] For example, an entire sequence disclosed herein, or one or more portions thereof, may be used as a probe capable of specifically hybridizing to corresponding sequences and messenger RNAs. To achieve specific hybridization under a variety of conditions, such probes include sequences that are unique among sequences and are generally at least about 10 nucleotides in length or at least about 20 nucleotides in length. Such probes may be used to amplify corresponding sequences from a chosen plant by PCR. This technique may be used to isolate additional coding sequences from a desired organism or as a diagnostic assay to determine the presence of coding sequences in an organism. Hybridization techniques include hybridization screening of plated DNA libraries (either plaques or colonies, see, for example, Sambrook, supra).

[0038] Hybridization of such sequences may be carried out under stringent conditions. The terms “stringent conditions” or “stringent hybridization conditions” are intended to mean conditions under which a probe will hybridize to its target sequence to a detectably greater degree than to other sequences (e.g., at least 2-fold over background). Stringent conditions are sequence-dependent and will be different in different circumstances. By controlling the stringency of the hybridization and/or washing conditions, target sequences that are 100% complementary to the probe can be identified (homologous probing). Alternatively, stringency conditions can be adjusted to allow some mismatching in sequences so that lower degrees of similarity are detected (heterologous probing). Generally, a probe is less than about 1000 nucleotides in length, optimally less than 500 nucleotides in length.

[0039] Typically, stringent conditions will be those in which the salt concentration is less than about 1.5 M Na ion, typically about 0.01 to 1.0 M Na ion concentration (or other salts) at pH 7.0 to 8.3 and the temperature is at least about 30° C. for short probes (e.g., 10 to 50 nucleotides) and at least about 60° C. for long probes (e.g., greater than 50 nucleotides). Stringent conditions may also be achieved with the addition of destabilizing agents such as formamide. Exemplary low stringency conditions include hybridization with a buffer solution of 30 to 35% formamide, 1 M NaCl, 1% SDS (sodium dodecyl sulphate) at 37° C. and a wash in 1 times to 2 times SSC (20 times SSC=3.0 M NaCl/0.3 M trisodium citrate) at 50 to 55° C. Exemplary moderate stringency conditions include hybridization in 40 to 45% formamide, 1.0 M NaCl, 1% SDS at 37° C. and a wash in 0.5 times to 1 times SSC at 55 to 60° C. Exemplary high stringency conditions include hybridization in 50% formamide, 1 M NaCl, 1% SDS at 37° C., and a final wash in 0.1 times SSC at 60 to 65° C. for a duration of at least 30 minutes. Duration of hybridization is generally less than about 24 hours, usually about 4 to about 12 hours. The duration of the wash time will be at least a length of time sufficient to reach equilibrium.

[0040] Specificity is typically the function of post-hybridization washes, the critical factors being the ionic strength and temperature of the final wash solution. For DNA-DNA hybrids, the thermal melting point (Tm) can be approximated from the equation of Meinkoth and Wahl, (1984) Anal. Biochem 138:267 284: Tm=81.5° C.+16.6 (log M)+0.41 (% GC)−0.61 (% form)−500/L; where M is the molarity of monovalent cations, % GC is the percentage of guanosine and cytosine nucleotides in the DNA, % form is the percentage of formamide in the hybridization solution, and L is the length of the hybrid in base pairs. The Tm is the temperature (under defined ionic strength and pH) at which 50% of a complementary target sequence hybridizes to a perfectly matched probe. Tm is reduced by about 1° C. for each 1% of mismatching, thus, Tm, hybridization, and/or wash conditions can be adjusted to hybridize to sequences of the desired identity. For example, if sequences with 90% identity are sought, the Tm can be decreased 10° C. Generally, stringent conditions are selected to be about 5° C. lower than the Tm for the specific sequence and its complement at a defined ionic strength and pH. However, severely stringent conditions can utilize a hybridization and/or wash at 1, 2, 3 or 4° C. lower than the Tm; moderately stringent conditions can utilize a hybridization and/or wash at 6, 7, 8, 9 or 10° C. lower than the Tm; low stringency conditions can utilize a hybridization and/or wash at 11, 12, 13, 14, 15 or 20° C. lower than the Tm. Using the equation, hybridization and wash compositions, and desired Tm, those of ordinary skill will understand that variations in the stringency of hybridization and/or wash solutions are inherently described. If the desired degree of mismatching results in a Tm of less than 45° C. (aqueous solution) or 32° C. (formamide solution), it is preferred to increase the SSC concentration so that a higher temperature can be used. An extensive guide to the hybridization of nucleic acids is found in Tijssen, (1993) Laboratory Techniques in Biochemistry and Molecular Biology—Hybridization with Nucleic Acid Probes, Part I, Chapter 2 (Elsevier, New York); and Ausubel, et al., eds. (1995) Current Protocols in Molecular Biology, Chapter 2 (Greene Publishing and Wiley-Interscience, New York), herein incorporated by reference in their entirety. See also, Sambrook supra. Thus, isolated sequences that have activity and which hybridize under stringent conditions to the sequences disclosed herein or to fragments thereof, are encompassed by the present disclosure. In general, sequences that have activity and hybridize to the sequences disclosed herein will be at least 40% to 50% homologous, about 60%, 70%, 80%, 85%, 90%, 95% to 98% homologous or more with the disclosed sequences. That is, the sequence similarity of sequences may range, sharing at least about 40% to 50%, about 60% to 70%, and about 80%, 85%, 90%, 95% to 98% sequence similarity.

[0041] The following terms are used to describe the sequence relationships between two or more nucleic acids or polynucleotides: (a) “reference sequence”, (b) “comparison window”, (c) “sequence identity”, (d) “percentage of sequence identity” and (e) “substantial identity”. As used herein, “reference sequence” is a defined sequence used as a basis for sequence comparison. A reference sequence may be a subset or the entirety of a specified sequence; for example, as a segment of a full-length cDNA or gene sequence or the complete cDNA or gene sequence.

[0042] As used herein, “comparison window” refers to a contiguous and specified segment of a polynucleotide sequence, wherein the polynucleotide sequence in the comparison window may comprise additions or deletions (i.e., gaps) compared to the reference sequence (which does not comprise additions or deletions) for optimal alignment of the two sequences. Generally, the comparison window is at least 20 contiguous nucleotides in length, and optionally can be 30, 40, 50, 100 or longer. Those of skill in the art understand that to avoid a high similarity to a reference sequence due to inclusion of gaps in the polynucleotide sequence, a gap penalty is typically introduced and is subtracted from the number of matches.

Methods of alignment of sequences for comparison are well known in the art. Thus, the determination of percent sequence identity between any two sequences can be accomplished using a mathematical algorithm. Non-limiting examples of such mathematical algorithms are the algorithm of Myers and Miller, (1988) CABIOS 4:11-17; the algorithm of Smith, et al., (1981) Adv. Appl. Math. 2:482; the algorithm of Needleman and Wunsch, (1970) J. Mol. Biol. 48:443-453; the algorithm of Pearson and Lipman, (1988) Proc. Natl. Acad. Sci. 85:2444-2448; the algorithm of Karlin and Altschul, (1990) Proc. Natl. Acad. Sci. USA 872:264, modified as in Karlin and Altschul, (1993) Proc. Natl. Acad. Sci. USA 90:5873-5877, herein incorporated by reference in their entirety.

[0043] Computer implementations of these mathematical algorithms can be utilized for comparison of sequences to determine sequence identity. Such implementations include, but are not limited to: CLUSTAL in the PC/Gene program (available from Intelligenetics, Mountain View, Calif.); the ALIGN program (Version 2.0) and GAP, BESTFIT, BLAST, FASTA and TFASTA in the GCG Wisconsin Genetics Software Package®, Version 10 (available from Accelrys Inc., 9685 Scranton Road, San Diego, Calif., USA). Alignments using these programs can be performed using the default parameters. The CLUSTAL program is well described by Higgins, et al., (1988) Gene 73:237-244; Higgins, et al., (1989) CABIOS 5:151-153; Corpet, et al., (1988) Nucleic Acids Res. 16:10881-90; Huang, et al., (1992) CABIOS 8:155-65; and Pearson, et al., (1994) Meth. Mol. Biol. 24:307-331, herein incorporated by reference in their entirety. The ALIGN program is based on the algorithm of Myers and Miller, (1988) supra. A PAM120 weight residue table, a gap length penalty of 12, and a gap penalty of 4 can be used with the ALIGN program when comparing amino acid sequences. The BLAST programs of Altschul, et al., (1990) J. Mol. Biol. 215:403, herein incorporated by reference in its entirety, are based on the algorithm of Karlin and Altschul, (1990) supra. BLAST nucleotide searches can be performed with the BLASTN program, score=100, word length=12, to obtain nucleotide sequences homologous to a nucleotide sequence encoding a protein of the disclosure. BLAST protein searches can be performed with the BLASTX program, score=50, word length=3, to obtain amino acid sequences homologous to a protein or polypeptide of the disclosure. To obtain gapped alignments for comparison purposes, Gapped BLAST (in BLAST 2.0) can be utilized as described in Altschul, et al., (1997) Nucleic Acids Res. 25:3389, herein incorporated by reference in its entirety. Alternatively, PSI-BLAST (in BLAST 2.0) can be used to perform an iterated search that detects distant relationships between molecules. See, Altschul, et al., (1997) supra. When utilizing BLAST, Gapped BLAST, PSI-BLAST, the default parameters of the respective programs (e.g., BLASTN for nucleotide sequences, BLASTX for proteins) can be used. See, the web site for the National Center for Biotechnology Information on the World Wide Web at ncbi.nlm.nih.gov. Alignment may also be performed manually by inspection.

[0044] Unless otherwise stated, sequence identity/similarity values provided herein refer to the value obtained using GAP Version 10 using the following parameters: % identity and % similarity for a nucleotide sequence using GAP Weight of 50 and Length Weight of 3, and the nwsgapdna.cmp scoring matrix; % identity and % similarity for an amino acid sequence using GAP Weight of 8 and Length Weight of 2, and the BLOSUM62 scoring matrix; or any equivalent program thereof. As used herein, “equivalent program” is any sequence comparison program that, for any two sequences in question, generates an alignment having identical nucleotide or amino acid residue matches and an identical percent sequence identity when compared to the corresponding alignment generated by GAP Version 10.

[0045] The GAP program uses the algorithm of Needleman and Wunsch, supra, to find the alignment of two complete sequences that maximizes the number of matches and minimizes the number of gaps. GAP considers all possible alignments and gap positions and creates the alignment with the largest number of matched bases and the fewest gaps. It allows for the provision of a gap creation penalty and a gap extension penalty in units of matched bases. GAP must make a profit of gap creation penalty number of matches for each gap it inserts. If a gap extension penalty greater than zero is chosen, GAP must, in addition, make a profit for each gap inserted of the length of the gap times the gap extension penalty. Default gap creation penalty values and gap extension penalty values in Version 10 of the GCG Wisconsin Genetics Software Package® for protein sequences are 8 and 2, respectively. For nucleotide sequences the default gap creation penalty is 50 while the default gap extension penalty is 3. The gap creation and gap extension penalties can be expressed as an integer selected from the group of integers consisting of from 0 to 200. Thus, for example, the gap creation and gap extension penalties can be 0, 1, 2, 3, 4, 5, 6, 7, 8, 9, 10, 15, 20, 25, 30, 35, 40, 45, 50, 55, 60, 65 or greater.

[0046] GAP presents one member of the family of best alignments. There may be many members of this family, but no other member has a better quality. GAP displays four figures of merit for alignments: Quality, Ratio, Identity and Similarity. The Quality is the metric maximized in order to align the sequences. Ratio is the Quality divided by the number of bases in the shorter segment. Percent Identity is the percent of the symbols that actually match. Percent Similarity is the percent of the symbols that are similar. Symbols that are across from gaps are ignored. A similarity is scored when the scoring matrix value for a pair of symbols is greater than or equal to 0.50, the similarity threshold. The scoring matrix used in Version 10 of the GCG Wisconsin Genetics Software Package® is BLOSUM62 (see, Henikoff and Henikoff, (1989) Proc. Natl. Acad. Sci. USA 89:10915, herein incorporated by reference in its entirety).

[0047] As used herein, “sequence identity” or “identity” in the context of two nucleic acid or polypeptide sequences refers to the residues in the two sequences that are the same when aligned for maximum correspondence over a specified comparison window. When percentage of sequence identity is used in reference to proteins it is recognized that residue positions which are not identical often differ by conservative amino acid substitutions, where amino acid residues are substituted for other amino acid residues with similar chemical properties (e.g., charge or hydrophobicity) and therefore do not change the functional properties of the molecule. When sequences differ in conservative substitutions, the percent sequence identity may be adjusted upwards to correct for the conservative nature of the substitution. Sequences that differ by such conservative substitutions are said to have “sequence similarity” or “similarity”. Means for making this adjustment are well known to those of skill in the art. Typically, this involves scoring a conservative substitution as a partial rather than a full mismatch, thereby increasing the percentage sequence identity. Thus, for example, where an identical amino acid is given a score of one and a non-conservative substitution is given a score of zero, a conservative substitution is given a score between zero and one. The scoring of conservative substitutions is calculated, e.g., as implemented in the program PC/GENE (Intelligenetics, Mountain View, Calif.).

[0048] As used herein, “percentage of sequence identity” means the value determined by comparing two optimally aligned sequences over a comparison window, wherein the portion of the polynucleotide sequence in the comparison window may comprise additions or deletions (i.e., gaps) as compared to the reference sequence (which does not comprise additions or deletions) for optimal alignment of the two sequences. The percentage is calculated by determining the number of positions at which the identical nucleic acid base or amino acid residue occurs in both sequences to yield the number of matched positions, dividing the number of matched positions by the total number of positions in the window of comparison, and multiplying the result by 100 to yield the percentage of sequence identity.

[0049] The term “substantial identity” of polynucleotide sequences means that a polynucleotide comprises a sequence that has at least 70% sequence identity, optimally at least 80%, more optimally at least 90% and most optimally at least 95%, compared to a reference sequence using an alignment program using standard parameters. One of skill in the art will recognize that these values can be appropriately adjusted to determine corresponding identity of proteins encoded by two nucleotide sequences by considering codon degeneracy, amino acid similarity, reading frame positioning and the like. Substantial identity of amino acid sequences for these purposes normally means sequence identity of at least 60%, 70%, 80%, 90% and at least 95%.

[0050] Another indication that nucleotide sequences are substantially identical is if two molecules hybridize to each other under stringent conditions. Generally, stringent conditions are selected to be about 5° C. lower than the Tm for the specific sequence at a defined ionic strength and pH. However, stringent conditions encompass temperatures in the range of about 1° C. to about 20° C. lower than the Tm, depending upon the desired degree of stringency as otherwise qualified herein. Nucleic acids that do not hybridize to each other under stringent conditions are still substantially identical if the polypeptides they encode are substantially identical. This may occur, e.g., when a copy of a nucleic acid is created using the maximum codon degeneracy permitted by the genetic code. One indication that two nucleic acid sequences are substantially identical is when the polypeptide encoded by the first nucleic acid is immunologically cross reactive with the polypeptide encoded by the second nucleic acid.

[0051] “Variants” is intended to mean substantially similar sequences. For polynucleotides, conservative variants include those sequences that, because of the degeneracy of the genetic code, encode the amino acid sequence of one of the morphogenic genes and/or genes/polynucleotides of interest disclosed herein. Variant polynucleotides also include synthetically derived polynucleotides, such as those generated, for example, by using site-directed mutagenesis but which still encode a protein of a morphogenic gene and/or gene/polynucleotide of interest disclosed herein. Generally, variants of a particular morphogenic gene and/or gene/polynucleotide of interest disclosed herein will have at least about 40%, 45%, 50%, 55%, 60%, 65%, 70%, 75%, 80%, 85%, 90%, 91%, 92%, 93%, 94%, 95%, 96%, 97%, 98%, 99% or more sequence identity to that particular morphogenic gene and/or gene/polynucleotide of interest as determined by sequence alignment programs and parameters described elsewhere herein.

[0052] “Variant” protein is intended to mean a protein derived from the native protein by deletion or addition of one or more amino acids at one or more internal sites in the native protein and/or substitution of one or more amino acids at one or more sites in the native protein. Variant proteins encompassed by the present disclosure are biologically active, that is they continue to possess the desired biological activity of the native protein, that is, the polypeptide has morphogenic gene and/or gene/polynucleotide of interest activity. Such variants may result from, for example, genetic polymorphism or from human manipulation. Biologically active variants of a native morphogenic gene and/or gene/polynucleotide of interest protein disclosed herein will have at least about 40%, 45%, 50%, 55%, 60%, 65%, 70%, 75%, 80%, 85%, 90%, 91%, 92%, 93%, 94%, 95%, 96%, 97%, 98%, 99% or more sequence identity to the amino acid sequence for the native protein as determined by sequence alignment programs and parameters described elsewhere herein. A biologically active variant of a protein of the disclosure may differ from that protein by as few as 1-15 amino acid residues, as few as 1-10, such as 6-10, as few as 5, as few as 4, 3, 2, or even 1 amino acid residue.

[0053] The sequences and genes disclosed herein, as well as variants and fragments thereof, are useful for the genetic engineering of plants, e.g. to produce a transformed or transgenic plant, to express a phenotype of interest. As used herein, the terms “transformed plant” and “transgenic plant” refer to a plant that comprises within its genome a heterologous polynucleotide. Generally, the heterologous polynucleotide is stably integrated within the genome of a transgenic or transformed plant such that the polynucleotide is passed on to successive generations. The heterologous polynucleotide may be integrated into the genome alone or as part of a recombinant DNA construct. It is to be understood that as used herein the term “transgenic” includes any cell, cell line, callus, tissue, plant part or plant the genotype of which has been altered by the presence of a heterologous nucleic acid including those transgenics initially so altered as well as those created by sexual crosses or asexual propagation from the initial transgenic.

[0054] A transgenic “event” is produced by transformation of plant cells with a heterologous DNA construct, including a nucleic acid expression cassette that comprises a gene of interest, the regeneration of a population of plants resulting from the insertion of the transferred gene into the genome of the plant and selection of a plant characterized by insertion into a particular genome location. An event is characterized phenotypically by the expression of the inserted gene. At the genetic level, an event is part of the genetic makeup of a plant. The term “event” also refers to progeny produced by a sexual cross between the transformant and another plant wherein the progeny include the heterologous DNA.

[0055] Transformation protocols as well as protocols for introducing nucleotide sequences into plants may vary depending on the type of plant or plant cell, i.e., monocot or dicot, targeted for transformation. Suitable methods of introducing nucleotide sequences into plant cells and subsequent insertion into the plant genome include microinjection (Crossway et al. (1986) Biotechniques 4:320-334), electroporation (Riggs et al. (1986) Proc. Natl. Acad. Sci. USA 83:5602-5606, Agrobacterium-mediated transformation (Townsend et al., U.S. Pat. No. 5,563,055; Zhao et al., U.S. Pat. No. 5,981,840), direct gene transfer (Paszkowski et al. (1984) EMBO J. 3:2717-2722), plastid transformation (see, for example Zora Svab, Peter Hajdukiewicz, and Pal Maliga (1990) Stable transformation of plastids in higher plants, Proc. Natl. Acad. Sci. 87:8526-8530) and in U.S. Pat. No. 5,877,402, incorporated herein by reference in their entireties, and ballistic particle acceleration (see, for example, Sanford et al., U.S. Pat. No. 4,945,050; Tomes et al., U.S. Pat. No. 5,879,918; Tomes et al., U.S. Pat. No. 5,886,244; Bidney et al., U.S. Pat. No. 5,932,782; Tomes et al. (1995) “Direct DNA Transfer into Intact Plant Cells via Microprojectile Bombardment,” in Plant Cell, Tissue, and Organ Culture: Fundamental Methods, ed. Gamborg and Phillips (Springer-Verlag, Berlin) (maize); McCabe et al. (1988) Biotechnology 6:923-926); and Lec1 transformation (WO 00/28058). Also see Weissinger et al. (1988) Ann. Rev. Genet. 22:421-477; Sanford et al. (1987) Particulate Science and Technology 5:27-37 (onion); Christou et al. (1988) Plant Physiol. 87:671-674 (soybean); McCabe et al. (1988) Bio/Technology 6:923-926 (soybean); Finer and McMullen (1991) In Vitro Cell Dev. Biol. 27P:175-182 (soybean); Singh et al. (1998) Theor. Appl. Genet. 96:319-324 (soybean); Datta et al. (1990) Biotechnology 8:736-740 (rice); Klein et al. (1988) Proc. Natl. Acad. Sci. USA 85:4305-4309 (maize); Klein et al. (1988) Biotechnology 6:559-563 (maize); Tomes, U.S. Pat. No. 5,240,855; Buising et al., U.S. Pat. Nos. 5,322,783 and 5,324,646; Klein et al. (1988) Plant Physiol. 91:440-444 (maize); Fromm et al. (1990) Biotechnology 8:833-839 (maize); Hooykaas-Van Slogteren et al. (1984) Nature (London) 311:763-764; Bowen et al., U.S. Pat. No. 5,736,369 (cereals); Bytebier et al. (1987) Proc. Natl. Acad. Sci. USA 84:5345-5349 (Liliaceae); De Wet et al. (1985) in The Experimental Manipulation of Ovule Tissues, ed. Chapman et al. (Longman, N.Y.), pp. 197-209 (pollen); Kaeppler et al. (1990) Plant Cell Reports 9:415-418 and Kaeppler et al. (1992) Theor. Appl. Genet. 84:560-566 (whisker-mediated transformation); D'Halluin et al. (1992) Plant Cell 4:1495-1505 (electroporation); Li et al. (1993) Plant Cell Reports 12:250-255; Christou and Ford (1995) Annals of Botany 75:407-413 (rice); Osjoda et al. (1996) Nature Biotechnology 14:745-750 (maize via Agrobacterium tumefaciens); and US Patent Application Publication Number 2017/0121722 (rapid plant transformation) all of which are herein incorporated by reference in their entireties.

[0056] The methods provided herein rely upon the use of bacteria-mediated and/or biolistic-mediated gene transfer to produce regenerable plant cells having an incorporated nucleotide sequence of interest. Bacterial strains useful in the methods of the disclosure include, but are not limited to, a disarmed Agrobacteria, an Ochrobactrum bacteria or a Rhizobiaceae bacteria.

[0057] Disarmed Agrobacteria useful in the present methods include, but are not limited to, AGL-1, EHA105, GV3101, LBA4404, and LBA4404 THY-.

[0058] Ochrobactrum bacterial strains useful in the present methods include, but are not limited to, those listed in Table 2 (see also U.S. Patent Appln. No. 20180216123 incorporated herein by reference in its entirety).

TABLE 2

Ochrobactrum haywardense H1 NRRL Deposit B-67078
Ochrobactrum cytisi
Ochrobactrum daejeonense
Ochrobactrum oryzae
Ochrobactrum tritici LBNL124-A-10
HTG3-C-07
Ochrobactrum pecoris
Ochrobactrum ciceri
Ochrobactrum gallinifaecis
Ochrobactrum grignonense
Ochrobactrum guangzhouense
Ochrobactrum haematophilum
Ochrobactrum intermedium
Ochrobactrum lupini
Ochrobactrum pituitosum
Ochrobactrum pseudintermedium
Ochrobactrum pseudogrignonense
Ochrobactrum rhizosphaerae
Ochrobactrum thiophenivorans
Ochrobactrum tritici

[0059] Rhizobiaceae bacterial strains useful in the present methods include, but are not limited to, those listed in Table 3 (see also U.S. Pat. No. 9,365,859 incorporated herein by reference in its entirety).

TABLE 3

Rhizobium lusitanum
Rhizobium rhizogenes
Agrobacterium rubi
Rhizobium multihospitium
Rhizobium tropici
Rhizobium miluonense
Rhizobium leguminosarum
Rhizobium leguminosarum bv. trifolii
Rhizobium leguminosarum bv. phaseoli
Rhizobium leguminosarum. bv. viciae
Rhizobium leguminosarum Madison
Rhizobium leguminosarum USDA2370
Rhizobium leguminosarum USDA2408
Rhizobium leguminosarum USDA2668
Rhizobium leguminosarum 2370G
Rhizobium leguminosarum 2370LBA
Rhizobium leguminosarum 2048G
Rhizobium leguminosarum 2048LBA
Rhizobium leguminosarum bv. phaseoli 2668G
Rhizobium leguminosarum bv. phaseoli 2668LBA
Rhizobium leguminosarum RL542C
Rhizobium etli USDA 9032
Rhizobium etli bv. phaseoli
Rhizobium endophyticum
Rhizobium tibeticum
Rhizobium etli
Rhizobium pisi
Rhizobium phaseoli
Rhizobium fabae
Rhizobium hainanense
Arthrobacter viscosus
Rhizobium alamii
Rhizobium mesosinicum
Rhizobium sullae
Rhizobium indigoferae
Rhizobium gallicum
Rhizobium yanglingense
Rhizobium mongolense
Rhizobium oryzae
Rhizobium loessense
Rhizobium tubonense
Rhizobium cellulosilyticum
Rhizobium soli
Neorhizobium galegae
Neorhizobium vignae
Neorhizobium huautlense
Neorhizobium alkalisoli
Aureimonas altamirensis
Aureimonas frigidaquae
Aureimonas ureilytica. Aurantimoncis coralicida
Fulvimarina pelagi
Martelella mediterranea
Allorhizobium undicola
Allorhizobium vitis
Allorhizobium borbor
Beijerinckia fluminensis
Agrobacterium larrymoorei
Agrobacterium radiobacter
Rhizobium selenitireducens corrig. Rhizobium rosettiformans
Rhizobium daejeonense
Rhizobium aggregatum
Pararhizobium capsulatum
Pararhizobium giardinii
Ensifer mexicanus
Ensifer terangae
Ensifer saheli
Ensifer kostiensis
Ensifer kummerowiae
Ensifer fredii
Sinorhizobium cimericanum
Ensifer arboris
Ensifer garamanticus
Ensifer meliloti
Ensifer numidicus
Ensifer adhaerens
Sinorhizobium sp.
Sinorhizobium meliloti SD630
Sinorhizobium meliloti USDA1002
Sinorhizobium fredii USDA205
Sinorhizobium fredii SF542G
Sinorhizobium fredii SF4404
Sinorhizobium fredii SM542C.

[0060] The polynucleotide of the disclosure may be introduced into plants by contacting plants with a virus or viral nucleic acids. Generally, such methods involve incorporating a nucleotide construct of the disclosure within a viral DNA or RNA molecule. Methods for introducing polynucleotides into plants and expressing a protein encoded therein, involving viral DNA or RNA molecules, are known in the art. See, for example, U.S. Pat. Nos. 5,889,191, 5,889,190, 5,866,785, 5,589,367, 5,316,931 and Porta, et al., (1996) Molecular Biotechnology 5:209-221, herein incorporated by reference in their entirety.

[0061] The methods of the disclosure involve introducing a polypeptide or polynucleotide into a plant. As used herein, “introducing” means presenting to the plant the polynucleotide or polypeptide in such a manner that the sequence gains access to the interior of a cell of the plant. The methods of the disclosure do not depend on a particular method for introducing a sequence into a plant, only that the polynucleotide or polypeptides gains access to the interior of at least one cell of the plant. Methods for introducing polynucleotide or polypeptides into plants are known in the art including, but not limited to, stable transformation methods, transient transformation methods and virus-mediated methods.

[0062] A “stable transformation” is a transformation in which the nucleotide construct introduced into a plant integrates into the genome of the plant and is capable of being inherited by the progeny thereof. “Transient transformation” means that a polynucleotide is introduced into the plant and does not integrate into the genome of the plant or a polypeptide is introduced into a plant.

[0063] Reporter genes or selectable marker genes may also be included in the expression cassettes and used in the methods of the disclosure. Examples of suitable reporter genes known in the art can be found in, for example, Jefferson, et al., (1991) in Plant Molecular Biology Manual, ed. Gelvin, et al., (Kluwer Academic Publishers), pp. 1-33; DeWet, et al., (1987) Mol. Cell. Biol. 7:725-737; Goff, et al., (1990) EMBO J. 9:2517-2522; Kain, et al., (1995) Bio Techniques 19:650-655 and Chiu, et al., (1996) Current Biology 6:325-330, herein incorporated by reference in their entirety.

[0064] A selectable marker comprises a DNA segment that allows one to identify or select for or against a molecule or a cell that contains it, often under particular conditions. These markers can encode an activity, such as, but not limited to, production of RNA, peptide, or protein, or can provide a binding site for RNA, peptides, proteins, inorganic and organic compounds or compositions and the like. Examples of selectable markers include, but are not limited to, DNA segments that comprise restriction enzyme sites; DNA segments that encode products which provide resistance against otherwise toxic compounds (e.g., antibiotics, such as, spectinomycin, ampicillin, kanamycin, tetracycline, Basta, neomycin phosphotransferase II (NEO) and hygromycin phosphotransferase (HPT)); DNA segments that encode products which are otherwise lacking in the recipient cell (e.g., tRNA genes, auxotrophic markers); DNA segments that encode products which can be readily identified (e.g., phenotypic markers such as β-galactosidase, GUS; fluorescent proteins such as green fluorescent protein (GFP), cyan (CFP), yellow (YFP), red (RFP), and cell surface proteins); the generation of new primer sites for PCR (e.g., the juxtaposition of two DNA sequence not previously juxtaposed), the inclusion of DNA sequences not acted upon or acted upon by a restriction endonuclease or other DNA modifying enzyme, chemical, etc.; and, the inclusion of a DNA sequences required for a specific modification (e.g., methylation) that allows its identification.

[0065] Selectable marker genes for selection of transformed cells or tissues can include genes that confer antibiotic resistance or resistance to herbicides. Examples of suitable selectable marker genes include, but are not limited to, genes encoding resistance to chloramphenicol (Herrera Estrella, et al., (1983) EMBO J. 2:987-992); methotrexate (Herrera Estrella, et al., (1983) Nature 303:209-213; Meijer, et al., (1991) Plant Mol. Biol. 16:807-820); hygromycin (Waldron, et al., (1985) Plant Mol. Biol. 5:103-108 and Zhijian, et al., (1995) Plant Science 108:219-227); streptomycin (Jones, et al., (1987) Mol. Gen. Genet. 210:86-91); spectinomycin (Bretagne-Sagnard, et al., (1996) Transgenic Res. 5:131-137); bleomycin (Hille, et al., (1990) Plant Mol. Biol. 7:171-176); sulfonamide (Guerineau, et al., (1990) Plant Mol. Biol. 15:127-36); bromoxynil (Stalker, et al., (1988) Science 242:419-423); glyphosate (Shaw, et al., (1986) Science 233:478-481 and U.S. patent application Ser. Nos. 10/004,357 and 10/427,692); phosphinothricin (DeBlock, et al., (1987) EMBO J. 6:2513-2518), herein incorporated by reference in their entirety.

[0066] Selectable markers that confer resistance to herbicidal compounds include genes encoding resistance and/or tolerance to herbicidal compounds, such as glyphosate, sulfonylureas, glufosinate ammonium, bromoxynil, imidazolinones, and 2,4-dichlorophenoxyacetate (2,4-D). See generally, Yarranton (1992) Curr. Opin. Biotech. 3:506-511; Christopherson et al. (1992) Proc. Natl. Acad. Sci. USA 89:6314-6318; Yao et al. (1992) Cell 71:63-72; Reznikoff (1992) Mol. Microbiol. 6:2419-2422; Barkley et al. (1980) in The Operon, pp. 177-220; Hu et al. (1987) Cell 48:555-566; Brown et al. (1987) Cell 49:603-612; Figge et al. (1988) Cell 52:713-722; Deuschle et al. (1989) Proc. Natl. Acad. Sci. USA 86:5400-5404; Fuerst et al. (1989) Proc. Natl. Acad. Sci. USA 86:2549-2553; Deuschle et al. (1990) Science 248:480-483; Gossen (1993) Ph.D. Thesis, University of Heidelberg; Reines et al. (1993) Proc. Natl. Acad. Sci. USA 90:1917-1921; Labow et al. (1990) Mol. Cell. Biol. 10:3343-3356; Zambretti et al. (1992) Proc. Natl. Acad. Sci. USA 89:3952-3956; Baim et al. (1991) Proc. Natl. Acad. Sci. USA 88:5072-5076; Wyborski et al. (1991) Nucleic Acids Res. 19:4647-4653; Hillen and Wissman (1989) Topics Mol. Struc. Biol. 10:143-162; Degenkolb et al. (1991) Antimicrob. Agents Chemother. 35:1591-1595; Kleinschnidt et al. (1988) Biochemistry 27:1094-1104; Bonin (1993) Ph.D. Thesis, University of Heidelberg; Gossen et al. (1992) Proc. Natl. Acad. Sci. USA 89:5547-5551; Oliva et al. (1992) Antimicrob. Agents Chemother. 36:913-919; Hlavka et al. (1985) Handbook of Experimental Pharmacology, Vol. 78 (Springer-Verlag, Berlin); Gill et al. (1988) Nature 334:721-724. Such disclosures are herein incorporated by reference.

[0067] Certain seletable markers useful in the present method include, but are not limited to, the maize HRA gene (Lee et al., 1988, EMBO J 7:1241-1248) which confers resistance to sulfonylureas and imidazolinones, the GAT gene which confers resistance to glyphosate (Castle et al., 2004, Science 304:1151-1154), genes that confer resistance to spectinomycin such as the aadA gene (Svab et al., 1990, Plant Mol Biol. 14:197-205) and the bar gene that confers resistance to glufosinate ammonium (White et al., 1990, Nucl. Acids Res. 25:1062), and PAT (or moPAT for corn, see Rasco-Gaunt et al., 2003, Plant Cell Rep.21:569-76) and the PMI gene that permits growth on mannose-containing medium (Negrotto et al., 2000, Plant Cell Rep. 22:684-690) are very useful for rapid selection during the brief elapsed time encompassed by somatic embryogenesis and embry maturation of the method. However, depending on the selectable marker used and the crop, inbred or variety being transformed, the percentage of wild-type escapes can vary. In maize and sorghum, the HRA gene is efficacious in reducing the frequency of wild-type escapes.

[0068] Other genes that could have utility in the recovery of transgenic events would include, but are not limited to, examples such as GUS (beta-glucuronidase; Jefferson, (1987) Plant Mol. Biol. Rep. 5:387), GFP (green fluorescence protein; Chalfie, et al., (1994) Science 263:802), luciferase (Riggs, et al., (1987) Nucleic Acids Res. 15(19):8115 and Luehrsen, et al., (1992) Methods Enzymol. 216:397-414), various fluorescent proteins with a spectrum of alternative emission optima spanning Far-Red, Red, Orange, Yellow, Green Cyan and Blue (Shaner et al., 2005, Nature Methods 2:905-909) and the maize genes encoding for anthocyanin production (Ludwig, et al., (1990) Science 247:449), herein incorporated by reference in their entireties.

[0069] The above list of selectable markers is not meant to be limiting. Any selectable marker can be used in the methods of the disclosure.

[0070] In an aspect, the methods of the disclosure provide transformation methods that allow positive growth selection. One skilled in the art can appreciate that conventional plant transformation methods have relied predominantly on negative selection schemes as described above, in which an antibiotic or herbicide (a negative selective agent) is used to inhibit or kill non-transformed cells or tissues, and the transgenic cells or tissues continue to grow due to expression of a resistance gene. In contrast, the methods of the present disclosure can be used with no application of a negative selective agent. Thus, although wild-type cells can grow unhindered, by comparison cells impacted by the controlled expression of a morphogenic gene can be readily identified due to their accelerated growth rate relative to the surrounding wild-type tissue. In addition to simply observing faster growth, the methods of the disclosure provide transgenic cells that exhibit more rapid morphogenesis relative to non-transformed cells. Accordingly, such differential growth and morphogenic development can be used to easily distinguish transgenic plant structures from the surrounding non-transformed tissue, a process which is termed herein as “positive growth selection.”

[0071] The present disclosure provides methods for producing transgenic plants with increased efficiency and speed and providing significantly higher transformation frequencies and significantly more quality events (events containing one copy of a trait gene cassette with no vector (plasmid) backbone) in multiple inbred lines using a variety of starting tissue types, including transformed inbreds representing a range of genetic diversities and having significant commercial utility. The disclosed methods can further comprise polynucleotides that provide for improved traits and characteristics.

[0072] As used herein, “trait” refers to a physiological, morphological, biochemical, or physical characteristic of a plant or particular plant material or cell. In some instances, this characteristic is visible to the human eye, such as seed or plant size, or can be measured by biochemical techniques, such as detecting the protein, starch, or oil content of seed or leaves, or by observation of a metabolic or physiological process, e.g. by measuring uptake of carbon dioxide, or by the observation of the expression level of a gene or genes, e.g., by employing Northern analysis, RT-PCR, microarray gene expression assays, or reporter gene expression systems, or by agricultural observations such as stress tolerance, yield, or pathogen tolerance.

[0073] Agronomically important traits such as oil, starch, and protein content can be genetically altered in addition to using traditional breeding methods. Modifications include increasing content of oleic acid, saturated and unsaturated oils, increasing levels of lysine and sulfur, providing essential amino acids, and also modification of starch. Hordothionin protein modifications are described in U.S. Pat. Nos. 5,703,049, 5,885,801, 5,885,802, and 5,990,389, herein incorporated by reference. Another example is lysine and/or sulfur rich seed protein encoded by the soybean 2S albumin described in U.S. Pat. No. 5,850,016, and the chymotrypsin inhibitor from barley, described in Williamson et al. (1987) Eur. J. Biochem. 165:99-106, the disclosures of which are herein incorporated by reference.

[0074] Derivatives of the coding sequences can be made by site-directed mutagenesis to increase the level of preselected amino acids in the encoded polypeptide. For example, methionine-rich plant proteins such as from sunflower seed (Lilley et al. (1989) Proceedings of the World Congress on Vegetable Protein Utilization in Human Foods and Animal Feedstuffs, ed. Applewhite (American Oil Chemists Society, Champaign, Ill.), pp. 497-502; herein incorporated by reference); corn (Pedersen et al. (1986) J. Biol. Chem. 261:6279; Kirihara et al. (1988) Gene 71:359; both of which are herein incorporated by reference); and rice (Musumura et al. (1989) Plant Mol. Biol. 12:123, herein incorporated by reference) could be used. Other agronomically important genes encode latex, Floury 2, growth factors, seed storage factors, and transcription factors.

[0075] Many agronomic traits can affect “yield”, including without limitation, plant height, pod number, pod position on the plant, number of internodes, incidence of pod shatter, grain size, efficiency of nodulation and nitrogen fixation, efficiency of nutrient assimilation, resistance to biotic and abiotic stress, carbon assimilation, plant architecture, resistance to lodging, percent seed germination, seedling vigor, and juvenile traits. Other traits that can affect yield include, efficiency of germination (including germination in stressed conditions), growth rate (including growth rate in stressed conditions), ear number, seed number per ear, seed size, composition of seed (starch, oil, protein) and characteristics of seed fill. Also of interest is the generation of transgenic plants that demonstrate desirable phenotypic properties that may or may not confer an increase in overall plant yield. Such properties include enhanced plant morphology, plant physiology or improved components of the mature seed harvested from the transgenic plant.

[0076] “Increased yield” of a transgenic plant of the present disclosure may be evidenced and measured in a number of ways, including test weight, seed number per plant, seed weight, seed number per unit area (i.e. seeds, or weight of seeds, per acre), bushels per acre, tons per acre, kilo per hectare. For example, maize yield may be measured as production of shelled corn kernels per unit of production area, e.g. in bushels per acre or metric tons per hectare, often reported on a moisture adjusted basis, e.g., at 15.5% moisture. Increased yield may result from improved utilization of key biochemical compounds, such as nitrogen, phosphorous and carbohydrate, or from improved tolerance to environmental stresses, such as cold, heat, drought, salt, and attack by pests or pathogens. Trait-enhancing recombinant DNA may also be used to provide transgenic plants having improved growth and development, and ultimately increased yield, as the result of modified expression of plant growth regulators or modification of cell cycle or photosynthesis pathways.

[0077] An “enhanced trait” as used in describing the aspects of the present disclosure includes improved or enhanced water use efficiency or drought tolerance, osmotic stress tolerance, high salinity stress tolerance, heat stress tolerance, enhanced cold tolerance, including cold germination tolerance, increased yield, improved seed quality, enhanced nitrogen use efficiency, early plant growth and development, late plant growth and development, enhanced seed protein, and enhanced seed oil production.

[0078] Any polynucleotide of interest can be used in the methods of the disclosure. Various changes in phenotype, imparted by a gene of interest, include those for modifying the fatty acid composition in a plant, altering the amino acid content, starch content, or carbohydrate content of a plant, altering a plant's pathogen defense mechanism, altering kernel size, altering sucrose loading, and the like. The gene of interest may also be involved in regulating the influx of nutrients, and in regulating expression of phytate genes particularly to lower phytate levels in the seed. These results can be achieved by providing expression of heterologous products or increased expression of endogenous products in plants. Alternatively, the results can be achieved by providing for a reduction of expression of one or more endogenous products, particularly enzymes or cofactors in the plant. These changes result in a change in phenotype of the transformed plant.

[0079] Genes of interest are reflective of the commercial markets and interests of those involved in the development of the crop. Crops and markets of interest change, and as developing nations open up world markets, new crops and technologies will emerge also. In addition, as the understanding of agronomic traits and characteristics such as yield and heterosis increase, the choice of genes for transformation will change accordingly. General categories of nucleotide sequences or genes of interest usefil in the methods of the disclosure include, for example, those genes involved in information, such as zinc fingers, those involved in communication, such as kinases, and those involved in housekeeping, such as heat shock proteins. More specific categories of transgenes, for example, include genes encoding important traits for agronomics, insect resistance, disease resistance, herbicide resistance, sterility, environmental stress resistance (altered tolerance to cold, salt, drought, etc.), grain characteristics, and commercial products.

[0080] Heterologous coding sequences, heterologous polynucleotides, and polynucleotides of interest expressed by a promoter sequence transformed by the methods disclosed herein may be used for varying the phenotype of a plant. Various changes in phenotype are of interest including modifying expression of a gene in a plant, altering a plant's pathogen or insect defense mechanism, increasing a plant's tolerance to herbicides, altering plant development to respond to environmental stress, modulating the plant's response to salt, temperature (hot and cold), drought and the like. These results can be achieved by the expression of a heterologous nucleotide sequence of interest comprising an appropriate gene product. In specific aspects, the heterologous nucleotide sequence of interest is an endogenous plant sequence whose expression level is increased in the plant or plant part. Results can be achieved by providing for altered expression of one or more endogenous gene products, particularly hormones, receptors, signaling molecules, enzymes, transporters or cofactors or by affecting nutrient uptake in the plant. These changes result in a change in phenotype of the transformed plant. Still other categories of transgenes include genes for inducing expression of exogenous products such as enzymes, cofactors, and hormones from plants and other eukaryotes as well as prokaryotic organisms.

[0081] It is recognized that any gene of interest, polynucleotide of interest, or multiple genes/polynucleotides of interest can be operably linked to a promoter or promoters and expressed in a plant transformed by the methods disclosed herein, for example insect resistance traits which can be stacked with one or more additional input traits (e.g., herbicide resistance, fungal resistance, virus resistance, stress tolerance, disease resistance, male sterility, stalk strength, and the like) or output traits (e.g., increased yield, modified starches, improved oil profile, balanced amino acids, high lysine or methionine, increased digestibility, improved fiber quality, drought resistance, and the like).

[0082] A promoter can be operably linked to agronomically important traits for expression in plants transformed by the methods disclosed herein that affect quality of grain, such as levels (increasing content of oleic acid) and types of oils, saturated and unsaturated, quality and quantity of essential amino acids, increasing levels of lysine and sulfur, levels of cellulose, and starch and protein content. A promoter can be operably linked to genes providing hordothionin protein modifications for expression in plants transformed by the methods disclosed herein which are described in U.S. Pat. Nos. 5,990,389; 5,885,801; 5,885,802 and 5,703,049; herein incorporated by reference in their entirety. Another example of a gene to which a promoter can be operably linked to for expression in plants transformed by the methods disclosed herein is a lysine and/or sulfur rich seed protein encoded by the soybean 2S albumin described in U.S. Pat. No. 5,850,016, and the chymotrypsin inhibitor from barley, Williamson, et al., (1987) Eur. J. Biochem 165:99-106, the disclosures of which are herein incorporated by reference in their entirety.

[0083] A promoter can be operably linked to insect resistance genes that encode resistance to pests that have yield drag such as rootworm, cutworm, European corn borer and the like for expression in plants transformed by the methods disclosed herein. Such genes include, for example, Bacillus thuringiensis toxic protein genes, U.S. Pat. Nos. 5,366,892; 5,747,450; 5,736,514; 5,723,756; 5,593,881 and Geiser, et al., (1986) Gene 48:109, the disclosures of which are herein incorporated by reference in their entirety. Genes encoding disease resistance traits that can be operably linked to a promoter for expression in plants transformed by the methods disclosed herein include, for example, detoxification genes, such as those which detoxify fumonisin (U.S. Pat. No. 5,792,931); avirulence (avr) and disease resistance (R) genes (Jones, et al., (1994) Science 266:789; Martin, et al., (1993) Science 262:1432; and Mindrinos, et al., (1994) Cell 78:1089), herein incorporated by reference in their entirety.

[0084] Herbicide resistance traits that can be operably linked to a promoter for expression in plants transformed by the methods disclosed herein include genes coding for resistance to herbicides that act to inhibit the action of acetolactate synthase (ALS), in particular the sulfonylurea-type herbicides (e.g., the acetolactate synthase (ALS) gene containing mutations leading to such resistance, in particular the S4 and/or Hra mutations), genes coding for resistance to herbicides that act to inhibit action of glutamine synthase, such as phosphinothricin or basta (e.g., the bar gene), genes coding for resistance to glyphosate (e.g., the EPSPS gene and the GAT gene; see, for example, US Patent Application Publication Number 2004/0082770, WO 03/092360 and WO 05/012515, herein incorporated by reference in their entirety) or other such genes known in the art. The bar gene encodes resistance to the herbicide basta, the nptll gene encodes resistance to the antibiotics kanamycin and geneticin and the ALS-gene mutants encode resistance to the herbicide chlorsulfuron any and all of which can be operably linked to a promoter for expression in plants transformed by the methods disclosed herein.

[0085] Glyphosate resistance is imparted by mutant 5-enolpyruvl-3-phosphikimate synthase (EPSPS) and aroA genes which can be operably linked to a promoter for expression in plants transformed by the methods disclosed herein. See, for example, U.S. Pat. No. 4,940,835 to Shah, et al., which discloses the nucleotide sequence of a form of EPSPS which can confer glyphosate resistance. U.S. Pat. No. 5,627,061 to Barry, et al., also describes genes encoding EPSPS enzymes which can be operably linked to a promoter for expression in plants transformed by the methods disclosed herein. See also, U.S. Pat. Nos. 6,248,876 B1; 6,040,497; 5,804,425; 5,633,435; 5,145,783; 4,971,908; 5,312,910; 5,188,642; 4,940,835; 5,866,775; 6,225,114 B1; 6,130,366; 5,310,667; 4,535,060; 4,769,061; 5,633,448; 5,510,471; Re. 36,449; RE 37,287 E and 5,491,288 and international publications WO 97/04103; WO 97/04114; WO 00/66746; WO 01/66704; WO 00/66747 and WO 00/66748, which are incorporated herein by reference in their entirety. Glyphosate resistance is also imparted to plants that express a gene which can be operably linked to a promoter for expression in plants transformed by the methods disclosed herein that encodes a glyphosate oxido-reductase enzyme as described more fully in U.S. Pat. Nos. 5,776,760 and 5,463,175, which are incorporated herein by reference in their entirety. Glyphosate resistance can also be imparted to plants by the over expression of genes which can be operably linked to a promoter for expression in plants transformed by the methods disclosed herein encoding glyphosate N-acetyltransferase. See, for example, US Patent Application Publication Number 2004/0082770, WO 03/092360 and WO 05/012515, herein incorporated by reference in their entirety.

[0086] Sterility genes operably linked to a promoter for expression in plants transformed by the methods disclosed herein can also be encoded in a DNA construct and provide an alternative to physical detasseling. Examples of genes used in such ways include male tissue-preferred genes and genes with male sterility phenotypes such as QM, described in U.S. Pat. No. 5,583,210, herein incorporated by reference in its entirety. Other genes which can be operably linked to a promoter for expression in plants transformed by the methods disclosed herein include kinases and those encoding compounds toxic to either male or female gametophytic development.

[0087] Commercial traits can also be encoded by a gene or genes operably linked to a promoter for expression in plants transformed by the methods disclosed herein that could increase for example, starch for ethanol production, or provide expression of proteins. Another important commercial use of transformed plants is the production of polymers and bioplastics such as described in U.S. Pat. No. 5,602,321, herein incorporated by reference in its entirety. Genes such as β-Ketothiolase, PHBase (polyhydroxybutyrate synthase), and acetoacetyl-CoA reductase, which facilitate expression of polyhydroxyalkanoates (PHAs) can be operably linked to a promoter for expression in plants transformed by the methods disclosed herein (see, Schubert, et al., (1988) J. Bacteriol. 170:5837-5847, herein incorporated by reference in its entirety).

[0088] Examples of other applicable genes and their associated phenotype which can be operably linked to a promoter for expression in plants transformed by the methods disclosed herein include genes that encode viral coat proteins and/or RNAs, or other viral or plant genes that confer viral resistance; genes that confer fungal resistance; genes that promote yield improvement; and genes that provide for resistance to stress, such as cold, dehydration resulting from drought, heat and salinity, toxic metal or trace elements or the like.

[0089] By way of illustration, without intending to be limiting, the following is a list of other examples of the types of genes which can be operably linked to a promoter for expression in plants transformed by the methods disclosed herein.

[0090] 1. Transgenes that Confer Resistance to Insects or Disease and that Encode:
[0091] (A) Plant disease resistance genes. Plant defenses are often activated by specific interaction between the product of a disease resistance gene (R) in the plant and the product of a corresponding avirulence (Avr) gene in the pathogen. A plant variety can be transformed with a cloned resistance gene to engineer plants that are resistant to specific pathogen strains. See, for example Jones, et al., (1994) Science 266:789 (cloning of the tomato Cf-9 gene for resistance to Cladosporium fulvum); Martin, et al., (1993) Science 262:1432 (tomato Pto gene for resistance to Pseudomonas syringae pv. tomato encodes a protein kinase); Mindrinos, et al., (1994) Cell 78:1089 (Arabidopsis RSP2 gene for resistance to Pseudomonas syringae); McDowell and Woffenden, (2003) Trends Biotechnol. 21(4):178-83 and Toyoda, et al., (2002) Transgenic Res. 11(6):567-82, herein incorporated by reference in their entirety. A plant resistant to a disease is one that is more resistant to a pathogen as compared to the wild type plant.
[0092] (B) A Bacillus thuringiensis protein, a derivative thereof or a synthetic polypeptide modeled thereon. See, for example, Geiser, et al., (1986) Gene 48:109, who disclose the cloning and nucleotide sequence of a Bt delta-endotoxin gene. Moreover, DNA molecules encoding delta-endotoxin genes can be purchased from American Type Culture Collection (Rockville, Md.), for example, under ATCC Accession Numbers 40098, 67136, 31995 and 31998. Other examples of Bacillus thuringiensis transgenes being genetically engineered are given in the following patents and patent applications and hereby are incorporated by reference for this purpose: U.S. Pat. Nos. 5,188,960; 5,689,052; 5,880,275; WO 91/14778; WO 99/31248; WO 01/12731; WO 99/24581; WO 97/40162 and U.S. application Ser. Nos. 10/032,717; 10/414,637 and 10/606,320, herein incorporated by reference in their entirety.
[0093] (C) An insect-specific hormone or pheromone such as an ecdysteroid and juvenile hormone, a variant thereof, a mimetic based thereon, or an antagonist or agonist thereof. See, for example, the disclosure by Hammock, et al., (1990) Nature 344:458, of baculovirus expression of cloned juvenile hormone esterase, an inactivator of juvenile hormone, herein incorporated by reference in its entirety.
[0094] (D) An insect-specific peptide which, upon expression, disrupts the physiology of the affected pest. For example, see the disclosures of Regan, (1994) J. Biol. Chem. 269:9 (expression cloning yields DNA coding for insect diuretic hormone receptor); Pratt, et al., (1989) Biochem. Biophys. Res. Comm.163:1243 (an allostatin is identified in Diploptera puntata); Chattopadhyay, et al., (2004) Critical Reviews in Microbiology 30(1):33-54; Zjawiony, (2004) J Nat Prod 67(2):300-310; Carlini and Grossi-de-Sa, (2002) Toxicon 40(11):1515-1539; Ussuf, et al., (2001) Curr Sci. 80(7):847-853 and Vasconcelos and Oliveira, (2004) Toxicon 44(4):385-403, herein incorporated by reference in their entirety. See also, U.S. Pat. No. 5,266,317 to Tomalski, et al., who disclose genes encoding insect-specific toxins, herein incorporated by reference in its entirety.
[0095] (E) An enzyme responsible for a hyperaccumulation of a monterpene, a sesquiterpene, a steroid, hydroxamic acid, a phenylpropanoid derivative or another non-protein molecule with insecticidal activity.
[0096] (F) An enzyme involved in the modification, including the post-translational modification, of a biologically active molecule; for example, a glycolytic enzyme, a proteolytic enzyme, a lipolytic enzyme, a nuclease, a cyclase, a transaminase, an esterase, a hydrolase, a phosphatase, a kinase, a phosphorylase, a polymerase, an elastase, a chitinase and a glucanase, whether natural or synthetic. See, PCT Application Number WO 93/02197 in the name of Scott, et al., which discloses the nucleotide sequence of a callase gene, herein incorporated by reference in its entirety. DNA molecules which contain chitinase-encoding sequences can be obtained, for example, from the ATCC under Accession Numbers 39637 and 67152. See also, Kramer, et al., (1993) Insect Biochem. Molec. Biol. 23:691, who teach the nucleotide sequence of a cDNA encoding tobacco hookworm chitinase, and Kawalleck, et al., (1993) Plant Molec. Biol. 21:673, who provide the nucleotide sequence of the parsley ubi4-2 polyubiquitin gene, U.S. patent application Ser. Nos. 10/389,432, 10/692,367 and U.S. Pat. No. 6,563,020, herein incorporated by reference in their entirety.
[0097] (G) A molecule that stimulates signal transduction. For example, see the disclosure by Botella, et al., (1994) Plant Molec. Biol. 24:757, of nucleotide sequences for mung bean calmodulin cDNA clones, and Griess, et al., (1994) Plant Physiol. 104:1467, who provide the nucleotide sequence of a maize calmodulin cDNA clone, herein incorporated by reference in their entirety.
[0098] (H) A hydrophobic moment peptide. See, PCT Application Number WO 95/16776 and U.S. Pat. No. 5,580,852 (disclosure of peptide derivatives of Tachyplesin which inhibit fungal plant pathogens) and PCT Application Number WO 95/18855 and U.S. Pat. No. 5,607,914) (teaches synthetic antimicrobial peptides that confer disease resistance), herein incorporated by reference in their entirety.
[0099] (I) A membrane permease, a channel former or a channel blocker. For example, see the disclosure by Jaynes, et al., (1993) Plant Sci. 89:43, of heterologous expression of a cecropin-beta lytic peptide analog to render transgenic tobacco plants resistant to Pseudomonas solanacearum, herein incorporated by reference in its entirety.
[0100] (J) A viral-invasive protein or a complex toxin derived therefrom. For example, the accumulation of viral coat proteins in transformed plant cells imparts resistance to viral infection and/or disease development effected by the virus from which the coat protein gene is derived, as well as by related viruses. See, Beachy, et al., (1990) Ann. Rev. Phytopathol. 28:451, herein incorporated by reference in its entirety. Coat protein-mediated resistance has been conferred upon transformed plants against alfalfa mosaic virus, cucumber mosaic virus, tobacco streak virus, potato virus X, potato virus Y, tobacco etch virus, tobacco rattle virus and tobacco mosaic virus. Id.
[0101] (K) An insect-specific antibody or an immunotoxin derived therefrom. Thus, an antibody targeted to a critical metabolic function in the insect gut would inactivate an affected enzyme, killing the insect. Cf Taylor, et al., Abstract #497, SEVENTH INT'L SYMPOSIUM ON MOLECULAR PLANT-MICROBE INTERACTIONS (Edinburgh, Scotland, 1994) (enzymatic inactivation in transgenic tobacco via production of single-chain antibody fragments), herein incorporated by reference in its entirety.
[0102] (L) A virus-specific antibody. See, for example, Tavladoraki, et al., (1993) Nature 366:469, who show that transgenic plants expressing recombinant antibody genes are protected from virus attack, herein incorporated by reference in its entirety.
[0103] (M) A developmental-arrestive protein produced in nature by a pathogen or a parasite. Thus, fungal endo alpha-1,4-D-polygalacturonases facilitate fungal colonization and plant nutrient release by solubilizing plant cell wall homo-alpha-1,4-D-galacturonase. See, Lamb, et al., (1992) Bio/Technology 10:1436, herein incorporated by reference in its entirety. The cloning and characterization of a gene which encodes a bean endopolygalacturonase-inhibiting protein is described by Toubart, et al., (1992) Plant J. 2:367, herein incorporated by reference in its entirety.
[0104] (N) A developmental-arrestive protein produced in nature by a plant. For example, Logemann, et al., (1992) Bio/Technology 10:305, herein incorporated by reference in its entirety, have shown that transgenic plants expressing the barley ribosome-inactivating gene have an increased resistance to fungal disease.
[0105] (O) Genes involved in the Systemic Acquired Resistance (SAR) Response and/or the pathogenesis related genes. Briggs, (1995) Current Biology 5(2):128-131, Pieterse and Van Loon, (2004) Curr. Opin. Plant Bio. 7(4):456-64 and Somssich, (2003) Cell 113(7):815-6, herein incorporated by reference in their entirety.
[0106] (P) Antifungal genes (Cornelissen and Melchers, (1993) Pl. Physiol. 101:709-712 and Parijs, et al., (1991) Planta 183:258-264 and Bushnell, et al., (1998) Can. J. of Plant Path. 20(2):137-149. Also see, U.S. patent application Ser. No. 09/950,933, herein incorporated by reference in their entirety.
[0107] (Q) Detoxification genes, such as for fumonisin, beauvericin, moniliformin and zearalenone and their structurally related derivatives. For example, see, U.S. Pat. No. 5,792,931, herein incorporated by reference in its entirety.
[0108] (R) Cystatin and cysteine proteinase inhibitors. See, U.S. application Ser. No. 10/947,979, herein incorporated by reference in its entirety.
[0109] (S) Defensin genes. See, WO03/000863 and U.S. application Ser. No. 10/178,213, herein incorporated by reference in their entirety.
[0110] (T) Genes conferring resistance to nematodes. See, WO 03/033651 and Urwin, et. al., (1998) Planta 204:472-479, Williamson (1999) Curr Opin Plant Bio. 2(4):327-31, herein incorporated by reference in their entirety.
[0111] (U) Genes such as rcg1 conferring resistance to Anthracnose stalk rot, which is caused by the fungus Colletotrichum graminiola. See, Jung, et al., Generation-means analysis and quantitative trait locus mapping of Anthracnose Stalk Rot genes in Maize, Theor. Appl. Genet. (1994) 89:413-418, as well as, U.S. Provisional Patent Application No. 60/675,664, herein incorporated by reference in their entirety.

[0112] 2. Transgenes that Confer Resistance to a Herbicide, for Example:
[0113] (A) A herbicide that inhibits the growing point or meristem, such as an imidazolinone or a sulfonylurea. Exemplary genes in this category code for mutant ALS and AHAS enzyme as described, for example, by Lee, et al., (1988) EMBO J. 7:1241 and Miki, et al., (1990) Theor. Appl. Genet. 80:449, respectively. See also, U.S. Pat. Nos. 5,605,011; 5,013,659; 5,141,870; 5,767,361; 5,731,180; 5,304,732; 4,761,373; 5,331,107; 5,928,937 and 5,378,824 and international publication WO 96/33270, which are incorporated herein by reference in their entirety.
[0114] (B) Glyphosate (resistance imparted by mutant 5-enolpyruvl-3-phosphikimate synthase (EPSP) and aroA genes, respectively) and other phosphono compounds such as glufosinate (phosphinothricin acetyl transferase (PAT) and Streptomyces hygroscopicus phosphinothricin acetyl transferase (bar) genes) and pyridinoxy or phenoxy proprionic acids and cycloshexones (ACCase inhibitor-encoding genes). See, for example, U.S. Pat. No. 4,940,835 to Shah, et al., which discloses the nucleotide sequence of a form of EPSPS which can confer glyphosate resistance. U.S. Pat. No. 5,627,061 to Barry, et al., also describes genes encoding EPSPS enzymes. See also, U.S. Pat. Nos. 6,566,587; 6,338,961; 6,248,876 B1; 6,040,497; 5,804,425; 5,633,435; 5,145,783; 4,971,908; 5,312,910; 5,188,642; 4,940,835; 5,866,775; 6,225,114 B1; 6,130,366; 5,310,667; 4,535,060; 4,769,061; 5,633,448; 5,510,471; Re. 36,449; RE 37,287 E and 5,491,288 and international publications EP1173580; WO 01/66704; EP1173581 and EP1173582, which are incorporated herein by reference in their entirety. Glyphosate resistance is also imparted to plants that express a gene that encodes a glyphosate oxido-reductase enzyme as described more fully in U.S. Pat. Nos. 5,776,760 and 5,463,175, which are incorporated herein by reference in their entirety. In addition, glyphosate resistance can be imparted to plants by the over expression of genes encoding glyphosate N-acetyltransferase. See, for example, US Patent Application Publication Number 2004/0082770, WO 03/092360 and WO 05/012515, herein incorporated by reference in their entirety. A DNA molecule encoding a mutant aroA gene can be obtained under ATCC Accession Number 39256 and the nucleotide sequence of the mutant gene is disclosed in U.S. Pat. No. 4,769,061 to Comai, herein incorporated by reference in its entirety. EP Patent Application Number 0 333 033 to Kumada, et al., and U.S. Pat. No. 4,975,374 to Goodman, et al., disclose nucleotide sequences of glutamine synthetase genes which confer resistance to herbicides such as L-phosphinothricin, herein incorporated by reference in their entirety. The nucleotide sequence of a phosphinothricin-acetyl-transferase gene is provided in EP Patent Numbers 0 242 246 and 0 242 236 to Leemans, et al., De Greef, et al., (1989) Bio/Technology 7:61 which describe the production of transgenic plants that express chimeric bar genes coding for phosphinothricin acetyl transferase activity, herein incorporated by reference in their entirety. See also, U.S. Pat. Nos. 5,969,213; 5,489,520; 5,550,318; 5,874,265; 5,919,675; 5,561,236; 5,648,477; 5,646,024; 6,177,616 B1 and 5,879,903, herein incorporated by reference in their entirety. Exemplary genes conferring resistance to phenoxy proprionic acids and cycloshexones, such as sethoxydim and haloxyfop, are the Acc1-S1, Acc1-S2 and Acc1-S3 genes described by Marshall, et al., (1992) Theor. Appl. Genet. 83:435, herein incorporated by reference in its entirety.
[0115] (C) A herbicide that inhibits photosynthesis, such as a triazine (psbA and gs+ genes) and a benzonitrile (nitrilase gene). Przibilla, et al., (1991) Plant Cell 3:169, herein incorporated by reference in its entirety, describe the transformation of Chlamydomonas with plasmids encoding mutant psbA genes. Nucleotide sequences for nitrilase genes are disclosed in U.S. Pat. No. 4,810,648 to Stalker, herein incorporated by reference in its entirety, and DNA molecules containing these genes are available under ATCC Accession Numbers 53435, 67441 and 67442. Cloning and expression of DNA coding for a glutathione S-transferase is described by Hayes, et al., (1992) Biochem. J. 285:173, herein incorporated by reference in its entirety.
[0116] (D) Acetohydroxy acid synthase, which has been found to make plants that express this enzyme resistant to multiple types of herbicides, has been introduced into a variety of plants (see, e.g., Hattori, et al., (1995) Mol Gen Genet 246:419, herein incorporated by reference in its entirety). Other genes that confer resistance to herbicides include: a gene encoding a chimeric protein of rat cytochrome P4507A1 and yeast NADPH-cytochrome P450 oxidoreductase (Shiota, et al., (1994) Plant Physiol. 106(1):17-23), genes for glutathione reductase and superoxide dismutase (Aono, et al., (1995) Plant Cell Physiol 36:1687, and genes for various phosphotransferases (Datta, et al., (1992) Plant Mol Biol 20:619), herein incorporated by reference in their entirety.
[0117] (E) Protoporphyrinogen oxidase (protox) is necessary for the production of chlorophyll, which is necessary for all plant survival. The protox enzyme serves as the target for a variety of herbicidal compounds. These herbicides also inhibit growth of all the different species of plants present, causing their total destruction. The development of plants containing altered protox activity which are resistant to these herbicides are described in U.S. Pat. Nos. 6,288,306 B1; 6,282,837 B1 and 5,767,373; and international publication number WO 01/12825, herein incorporated by reference in their entirety.

[0118] 3. Transgenes that Confer or Contribute to an Altered Grain Characteristic, Such As:
[0119] (A) Altered fatty acids, for example, by
   [0120] (1) Down-regulation of stearoyl-ACP desaturase to increase stearic acid content of the plant. See, Knultzon, et al., (1992) Proc. Natl. Acad. Sci. USA 89:2624 and WO99/64579 (Genes for Desaturases to Alter Lipid Profiles in Corn), herein incorporated by reference in their entirety,
   [0121] (2) Elevating oleic acid via FAD-2 gene modification and/or decreasing linolenic acid via FAD-3 gene modification (see, U.S. Pat. Nos. 6,063,947; 6,323,392; 6,372,965 and WO 93/11245, herein incorporated by reference in their entirety),
   [0122] (3) Altering conjugated linolenic or linoleic acid content, such as in WO 01/12800, herein incorporated by reference in its entirety,
   [0123] (4) Altering LEC1, AGP, Dek1, Superal1, mi1ps, various 1pa genes such as lpa1, lpa3, hpt or hggt. For example, see, WO 02/42424, WO 98/22604, WO 03/011015, U.S. Pat. Nos. 6,423,886, 6,197,561, 6,825,397, US Patent Application Publication Numbers 2003/0079247, 2003/0204870, WO02/057439, WO03/011015 and Rivera-Madrid, et. al., (1995) Proc. Natl. Acad. Sci. 92:5620-5624, herein incorporated by reference in their entirety.
[0124] (B) Altered phosphorus content, for example, by the
   [0125] (1) Introduction of a phytase-encoding gene would enhance breakdown of phytate, adding more free phosphate to the transformed plant. For example, see, Van Hartingsveldt, et al., (1993) Gene 127:87, for a disclosure of the nucleotide sequence of an Aspergillus niger phytase gene, herein incorporated by reference in its entirety.
   [0126] (2) Up-regulation of a gene that reduces phytate content. In maize, this, for example, could be accomplished, by cloning and then re-introducing DNA associated with one or more of the alleles, such as the LPA alleles, identified in maize mutants characterized by low levels of phytic acid, such as in Raboy, et al., (1990) Maydica 35:383 and/or by altering inositol kinase activity as in WO 02/059324, US Patent Application Publication Number 2003/0009011, WO 03/027243, US Patent Application Publication Number 2003/0079247, WO 99/05298, U.S. Pat. Nos. 6,197,561, 6,291,224, 6,391,348, WO2002/059324, US Patent Application Publication Number 2003/0079247, WO98/45448, WO99/55882, WO01/04147, herein incorporated by reference in their entirety.
[0127] (C) Altered carbohydrates effected, for example, by altering a gene for an enzyme that affects the branching pattern of starch or a gene altering thioredoxin such as NTR and/or TRX (see, U.S. Pat. No. 6,531,648, which is incorporated by reference in its entirety) and/or a gamma zein knock out or mutant such as cs27 or TUSC27 or en27 (see, U.S. Pat. No. 6,858,778 and US Patent Application Publication Numbers 2005/0160488 and 2005/0204418; which are incorporated by reference in its entirety). See, Shiroza, et al., (1988) J. Bacteriol. 170:810 (nucleotide sequence of Streptococcus mutans fructosyltransferase gene), Steinmetz, et al., (1985) Mol. Gen. Genet. 200:220 (nucleotide sequence of Bacillus subtilis levansucrase gene), Pen, et al., (1992) Bio/Technology 10:292 (production of transgenic plants that express Bacillus licheniformis alpha-amylase), Elliot, et al., (1993) Plant Molec. Biol. 21:515 (nucleotide sequences of tomato invertase genes), Søgaard, et al., (1993) J. Biol. Chem. 268:22480 (site-directed mutagenesis of barley alpha-amylase gene) and Fisher, et al., (1993) Plant Physiol. 102:1045 (maize endosperm starch branching enzyme II), WO 99/10498 (improved digestibility and/or starch extraction through modification of UDP-D-xylose 4-epimerase, Fragile 1 and 2, Ref1, HCHL, C4H), U.S. Pat. No. 6,232,529 (method of producing high oil seed by modification of starch levels (AGP)), herein incorporated by reference in their entirety. The fatty acid modification genes mentioned above may also be used to affect starch content and/or composition through the interrelationship of the starch and oil pathways.
[0128] (D) Altered antioxidant content or composition, such as alteration of tocopherol or tocotrienols. For example, see U.S. Pat. No. 6,787,683, US Patent Application Publication Number 2004/0034886 and WO 00/68393 involving the manipulation of antioxidant levels through alteration of a phytl prenyl transferase (ppt), WO 03/082899 through alteration of a homogentisate geranyl geranyl transferase (hggt), herein incorporated by reference in their entirety.
[0129] (E) Altered essential seed amino acids. For example, see U.S. Pat. No. 6,127,600 (method of increasing accumulation of essential amino acids in seeds), U.S. Pat. No. 6,080,913 (binary methods of increasing accumulation of essential amino acids in seeds), U.S. Pat. No. 5,990,389 (high lysine), WO99/40209 (alteration of amino acid compositions in seeds), WO99/29882 (methods for altering amino acid content of proteins), U.S. Pat. No. 5,850,016 (alteration of amino acid compositions in seeds), WO98/20133 (proteins with enhanced levels of essential amino acids), U.S. Pat. No. 5,885,802 (high methionine), U.S. Pat. No. 5,885,801 (high threonine), U.S. Pat. No. 6,664,445 (plant amino acid biosynthetic enzymes), U.S. Pat. No. 6,459,019 (increased lysine and threonine), U.S. Pat. No. 6,441,274 (plant tryptophan synthase beta subunit), U.S. Pat. No. 6,346,403 (methionine metabolic enzymes), U.S. Pat. No. 5,939,599 (high sulfur), U.S. Pat. No. 5,912,414 (increased methionine), WO98/56935 (plant amino acid biosynthetic enzymes), WO98/45458 (engineered seed protein having higher percentage of essential amino acids), WO98/42831 (increased lysine), U.S. Pat. No. 5,633,436 (increasing sulfur amino acid content), U.S. Pat. No. 5,559,223 (synthetic storage proteins with defined structure containing programmable levels of essential amino acids for improvement of the nutritional value of plants), WO96/01905 (increased threonine), WO95/15392 (increased lysine), US Patent Application Publication Number 2003/0163838, US Patent Application Publication Number 2003/0150014, US Patent Application Publication Number 2004/0068767, U.S. Pat. No. 6,803,498, WO01/79516, and WO00/09706 (Ces A: cellulose synthase), U.S. Pat. No. 6,194,638 (hemicellulose), U.S. Pat. No. 6,399,859 and US Patent Application Publication Number 2004/0025203 (UDPGdH), U.S. Pat. No. 6,194,638 (RGP), herein incorporated by reference in their entirety.

[0130] 4. Genes that Create a Site for Site Specific DNA Integration

[0131] This includes the introduction of FRT sites that may be used in the FLP/FRT system and/or Lox sites that may be used in the Cre/Loxp system. For example, see Lyznik, et al., (2003) Plant Cell Rep 21:925-932 and WO 99/25821, which are hereby incorporated by reference in their entirety. Other systems that may be used include the Gin recombinase of phage Mu (Maeser, et al., 1991; Vicki Chandler, The Maize Handbook ch. 118 (Springer-Verlag 1994), the Pin recombinase of E. coli (Enomoto, et al., 1983), and the R/RS system of the pSR1 plasmid (Araki, et al., 1992), herein incorporated by reference in their entirety.

[0132] 5. Genes that affect abiotic stress resistance (including but not limited to flowering, ear and seed development, enhancement of nitrogen utilization efficiency, altered nitrogen responsiveness, drought resistance or tolerance, cold resistance or tolerance, and salt resistance or tolerance) and increased yield under stress. For example, see, WO 00/73475 where water use efficiency is altered through alteration of malate; U.S. Pat. Nos. 5,892,009, 5,965,705, 5,929,305, 5,891,859, 6,417,428, 6,664,446, 6,706,866, 6,717,034, WO2000060089, WO2001026459, WO2001035725, WO2001034726, WO2001035727, WO2001036444, WO2001036597, WO2001036598, WO2002015675, WO2002017430, WO2002077185, WO2002079403, WO2003013227, WO2003013228, WO2003014327, WO2004031349, WO2004076638, WO9809521, and WO9938977 describing genes, including CBF genes and transcription factors effective in mitigating the negative effects of freezing, high salinity, and drought on plants, as well as conferring other positive effects on plant phenotype; US Patent Application Publication Number 2004/0148654 and WO01/36596 where abscisic acid is altered in plants resulting in improved plant phenotype such as increased yield and/or increased tolerance to abiotic stress; WO2000/006341, WO04/090143, U.S. patent application Ser. No. 10/817,483 and U.S. Pat. No. 6,992,237, where cytokinin expression is modified resulting in plants with increased stress tolerance, such as drought tolerance, and/or increased yield, herein incorporated by reference in their entirety. Also see WO0202776, WO2003052063, JP2002281975, U.S. Pat. No. 6,084,153, WO0164898, U.S. Pat. Nos. 6,177,275 and 6,107,547 (enhancement of nitrogen utilization and altered nitrogen responsiveness), herein incorporated by reference in their entirety. For ethylene alteration, see US Patent Application Publication Number 2004/0128719, US Patent Application Publication Number 2003/0166197 and WO200032761, herein incorporated by reference in their entirety. For plant transcription factors or transcriptional regulators of abiotic stress, see, e.g., US Patent Application Publication Number 2004/0098764 or US Patent Application Publication Number 2004/0078852, herein incorporated by reference in their entirety.

[0133] 6. Other genes and transcription factors that affect plant growth and agronomic traits such as yield, flowering, plant growth and/or plant structure, can be introduced or introgressed into plants, see, e.g., WO97/49811 (LHY), WO98/56918 (ESD4), WO97/10339 and U.S. Pat. No. 6,573,430 (TFL), U.S. Pat. No. 6,713,663 (FT), WO96/14414 (CON), WO96/38560, WO01/21822 (VRN1), WO00/44918 (VRN2), WO99/49064 (GI), WO00/46358 (FRI), WO97/29123, U.S. Pat. Nos. 6,794,560, 6,307,126 (GAI), WO99/09174 (D8 and Rht) and WO2004076638 and WO2004031349 (transcription factors), herein incorporated by reference in their entirety.

[0134] As used herein, “antisense orientation” includes reference to a polynucleotide sequence that is operably linked to a promoter in an orientation where the antisense strand is transcribed. The antisense strand is sufficiently complementary to an endogenous transcription product such that translation of the endogenous transcription product is often inhibited. “Operably linked” refers to the association of two or more nucleic acid fragments on a single nucleic acid fragment so that the function of one is affected by the other. For example, a promoter is operably linked with a coding sequence when it is capable of affecting the expression of that coding sequence (i.e., that the coding sequence is under the transcriptional control of the promoter). Coding sequences can be operably linked to regulatory sequences in sense or antisense orientation.

[0135] A heterologous nucleotide sequence operably linked to a promoter and its related biologically active fragments or variants useful in the methods disclosed herein may be an antisense sequence for a targeted gene. The terminology “antisense DNA nucleotide sequence” is intended to mean a sequence that is in inverse orientation to the 5′-to-3′ normal orientation of that nucleotide sequence. When delivered into a plant cell, expression of the antisense DNA sequence prevents normal expression of the DNA nucleotide sequence for the targeted gene. The antisense nucleotide sequence encodes an RNA transcript that is complementary to and capable of hybridizing to the endogenous messenger RNA (mRNA) produced by transcription of the DNA nucleotide sequence for the targeted gene. In this case, production of the native protein encoded by the targeted gene is inhibited to achieve a desired phenotypic response. Modifications of the antisense sequences may be made as long as the sequences hybridize to and interfere with expression of the corresponding mRNA. In this manner, antisense constructions having 70%, 80%, 85% sequence identity to the corresponding antisense sequences may be used. Furthermore, portions of the antisense nucleotides may be used to disrupt the expression of the target gene. Generally, sequences of at least 50 nucleotides, 100 nucleotides, 200 nucleotides or greater may be used. Thus, a promoter may be operably linked to antisense DNA sequences to reduce or inhibit expression of a native protein in the plant when transformed by the methods disclosed herein.

[0136] “RNAi” refers to a series of related techniques to reduce the expression of genes (see, for example, U.S. Pat. No. 6,506,559, herein incorporated by reference in its entirety). Older techniques referred to by other names are now thought to rely on the same mechanism, but are given different names in the literature. These include “antisense inhibition,” the production of antisense RNA transcripts capable of suppressing the expression of the target protein and “co-suppression” or “sense-suppression,” which refer to the production of sense RNA transcripts capable of suppressing the expression of identical or substantially similar foreign or endogenous genes (U.S. Pat. No. 5,231,020, incorporated herein by reference in its entirety). Such techniques rely on the use of constructs resulting in the accumulation of double stranded RNA with one strand complementary to the target gene to be silenced.

[0137] As used herein, the terms “promoter” or “transcriptional initiation region” mean a regulatory region of DNA usually comprising a TATA box or a DNA sequence capable of directing RNA polymerase II to initiate RNA synthesis at the appropriate transcription initiation site for a particular coding sequence. A promoter may additionally comprise other recognition sequences generally positioned upstream or 5′ to the TATA box or the DNA sequence capable of directing RNA polymerase II to initiate RNA synthesis, referred to as upstream promoter elements, which influence the transcription initiation rate.

[0138] The transcriptional initiation region, the promoter, may be native or homologous or foreign or heterologous to the host, or could be the natural sequence or a synthetic sequence. By foreign is intended that the transcriptional initiation region is not found in the wild-type host into which the transcriptional initiation region is introduced. Either a native or heterologous promoter may be used with respect to the coding sequence of interest.

[0139] The transcriptional cassette will include in the 5′-3′ direction of transcription, a transcriptional and translational initiation region, a DNA sequence of interest, and a transcriptional and translational termination region functional in plants. The termination region may be native with the transcriptional initiation region, may be native with the DNA sequence of interest, or may be derived from another source. Convenient termination regions are available from the potato proteinase inhibitor (PinII) gene or sequences from Ti-plasmid of A. tumefaciens, such as the nopaline synthase, octopine synthase and opaline synthase termination regions. See also, Guerineau et al., (1991) Mol. Gen. Genet. 262: 141-144; Proudfoot (1991) Cell 64: 671-674; Sanfacon et al. (1991) Genes Dev. 5: 141-149; Mogen et al. (1990) Plant Cell 2: 1261-1272; Munroe et al. (1990) Gene 91: 151-158; Ballas et al. 1989) Nucleic Acids Res. 17: 7891-7903; Joshi et al. (1987) Nucleic Acid Res. 15: 9627-9639.

[0140] The expression cassettes may additionally contain 5′ leader sequences in the expression cassette construct. Such leader sequences can act to enhance translation. Translation leaders are known in the art and include: picornavirus leaders, for example, EMCV leader (Encephalomyocarditis 5′noncoding region) (Elroy-Stein, O., Fuerst, T. R., and Moss, B. (1989) PNAS USA, 86: 6126-6130); potyvirus leaders, for example, TEV leader (Tobacco Etch Virus) (Allison et al. (1986); MDMV leader (Maize Dwarf Mosaic Virus); Virology, 154: 9-20), and human immunoglobulin heavy-chain binding protein (BiP), (Macejak, D. G., and P. Sarnow (1991) Nature, 353: 90-94; untranslated leader from the coat protein MARNA of alfalfa mosaic virus (AMV RNA 4), (Jobling, S. A., and Gehrke, L., (1987) Nature, 325: 622-625; tobacco mosaic virus leader (TMV), (Gallie et al. (1989) Molecular Biology of RNA, pages 237-256, Gallie et al. (1987) Nucl. Acids Res. 15: 3257-3273; maize chlorotic mottle virus leader (MCMV) (Lornmel, S. A. et al. (1991) Virology, 81: 382-385). See also, Della-Cioppa et al. (1987) Plant Physiology, 84: 965-968; and endogenous maize 5′ untranslated sequences. Other methods known to enhance translation can also be utilized, for example, introns, and the like.

[0141] The expression cassettes may contain one or more than one gene or nucleic acid sequence to be transferred and expressed in the transformed plant. Thus, each nucleic acid sequence will be operably linked to 5′ and 3′ regulatory sequences. Alternatively, multiple expression cassettes may be provided.

[0142] The morphogenic genes and/or genes/polynucleotides of interest introduced into an explant by the disclosed methods can be operably linked to a suitable promoter. A “plant promoter” is a promoter capable of initiating transcription in plant cells whether or not its origin is a plant cell. Exemplary plant promoters include, but are not limited to, those that are obtained from plants, plant viruses, and bacteria which comprise genes expressed in plant cells such as from Agrobacterium or Rhizobium. Examples of promoters under developmental control include promoters that preferentially initiate transcription in certain tissues, such as leaves, roots, or seeds. Such promoters are referred to as “tissue preferred”. Promoters which initiate transcription only in certain tissues are referred to as “tissue specific”. A “cell type” specific promoter primarily drives expression in certain cell types in one or more organs, for example, vascular cells in roots or leaves. Tissue specific, tissue preferred, cell type specific, and inducible promoters constitute the class of “non-constitutive” promoters.

[0143] An “inducible” or “repressible” promoter can be a promoter which is under either environmental or exogenous control. Examples of environmental conditions that may affect transcription by inducible promoters include anaerobic conditions, or certain chemicals, or the presence of light. Alternatively, exogenous control of an inducible or repressible promoter can be affected by providing a suitable chemical or other agent that via interaction with target polypeptides result in induction or repression of the promoter. Inducible promoters include heat-inducible promoters, estradiol-responsive promoters, chemical inducible promoters, and the like. Pathogen inducible promoters include those from pathogenesis-related proteins (PR proteins), which are induced following infection by a pathogen; e. g., PR proteins, SAR proteins, beta-1,3-glucanase, chitinase, etc. See, for example, Redolfi et al. (1983) Neth. J. Plant Pathol. 89: 245-254; Uknes et al. (1992) The Plant Cell 4: 645-656; and Van Loon (1985) Plant Mol. Virol. 4: 111-116. Inducible promoters useful in the present methods include GLB1, OLE, LTP2, XVE and heat shock inducible promoters HSP17.7, HSP26, HSP18A, AT-HSP811, AT-HSP811L, and GM-HSP173B.

[0144] A chemically-inducible promoter can be repressed by the tetraycline repressor (TETR), the ethametsulfuron repressor (ESR), or the chlorsulfuron repressor (CR), and de-repression occurs upon addition of tetracycline-related or sulfonylurea ligands. The repressor can be TETR and the tetracycline-related ligand is doxycycline or anhydrotetracycline. (Gatz, C., Frohberg, C. and Wendenburg, R. (1992) Stringent repression and homogeneous de-repression by tetracycline of a modified CaMV 35S promoter in intact transgenic tobacco plants, Plant J. 2, 397-404). Alternatively, the repressor can be ESR and the sulfonylurea ligand is ethametsulfuron, chlorsulfuron, metsulfuron-methyl, sulfometuron methyl, chlorimuron ethyl, nicosulfuron, primisulfuron, tribenuron, sulfosulfuron, trifloxysulfuron, foramsulfuron, iodosulfuron, prosulfuron, thifensulfuron, rimsulfuron, mesosulfuron, or halosulfuron (US20110287936 incorporated herein by reference in its entirety). If the repressor is CR, the CR ligand is chlorsulfuron. See, U.S. Pat. No. 8,580,556 incorporated herin by reference in its entirety.

[0145] A “constitutive” promoter is a promoter which is active under most conditions. Promoters useful in the present disclosure include those disclosed in WO2017/112006 and those disclosed in U.S. Provisional Application 62/562,663. Constitutive promoters for use in expression of genes in plants are known in the art. Such promoters include, but are not limited to 35S promoter of cauliflower mosaic virus (Depicker et al. (1982) Mol. Appl. Genet. 1: 561-573; Odell et al. (1985) Nature 313: 810-812), ubiquitin promoter (Christensen et al. (1992) Plant Mol. Biol. 18: 675-689), promoters from genes such as ribulose bisphosphate carboxylase (De Almeida et al. (1989) Mol. Gen. Genet. 218: 78-98), actin (McElroy et al. (1990) Plant J. 2: 163-171), histone, DnaJ (Baszczynski et al. (1997) Maydica 42: 189-201), and the like. In various aspects, constitutive promoters useful in the methods of the disclosure include UBI, LLDAV, EVCV, DMMV, BSV (AY) PRO, CYMV PRO FL, UBIZM PRO, SI-UB3 PRO, SB-UBI PRO (ALT1), USB1ZM PRO, ZM-GOS2 PRO, ZM-H1B PRO (1.2 KB), IN2-2, NOS, the −135 version of 35S, and ZM-ADF PRO (ALT2) promoters.

[0146] Promoters useful in the present disclosure include those disclosed in US Patent Application Publication Number 2017/0121722, U.S. Pat. No. 8,710,206, U.S. Provisional Patent Applications 62/562,663 and 62/641,725, and WO2017112006 all of which are incorporated herein by reference in their entireties.

[0147] As used herein, the term “regulatory element” also refers to a sequence of DNA, usually, but not always, upstream (5′) to the coding sequence of a structural gene, which includes sequences which control the expression of the coding region by providing the recognition for RNA polymerase and/or other factors required for transcription to start at a particular site. An example of a regulatory element that provides for the recognition for RNA polymerase or other transcriptional factors to ensure initiation at a particular site is a promoter element. A promoter element comprises a core promoter element, responsible for the initiation of transcription, as well as other regulatory elements that modify gene expression. It is to be understood that nucleotide sequences, located within introns or 3′ of the coding region sequence may also contribute to the regulation of expression of a coding region of interest. Examples of suitable introns include, but are not limited to, the maize IVS6 intron, or the maize actin intron. A regulatory element may also include those elements located downstream (3′) to the site of transcription initiation, or within transcribed regions, or both. In the context of the methods of the disclosure a post-transcriptional regulatory element may include elements that are active following transcription initiation, for example translational and transcriptional enhancers, translational and transcriptional repressors and mRNA stability determinants.

[0148] A “heterologous nucleotide sequence”, “heterologous polynucleotide of interest”, or “heterologous polynucleotide” as used throughout the disclosure, is a sequence that is not naturally occurring with or operably linked to a promoter. While this nucleotide sequence is heterologous to the promoter sequence, it may be homologous or native or heterologous or foreign to the plant host. Likewise, the promoter sequence may be homologous or native or heterologous or foreign to the plant host and/or the polynucleotide of interest.

[0149] The DNA constructs and expression cassettes useful in the methods of the disclosure can also include further enhancers, either translation or transcription enhancers, as may be required. These enhancer regions are well known to persons skilled in the art, and can include the ATG initiation codon and adjacent sequences. The initiation codon must be in phase with the reading frame of the coding sequence to ensure translation of the entire sequence. The translation control signals and initiation codons can be from a variety of origins, both natural and synthetic. Translational initiation regions may be provided from the source of the transcriptional initiation region, or from the structural gene. The sequence can also be derived from the regulatory element selected to express the gene, and can be specifically modified to increase translation of the mRNA. It is recognized that to increase transcription levels enhancers may be utilized in combination with promoter regions. It is recognized that to increase transcription levels, enhancers may be utilized in combination with promoter regions. Enhancers are nucleotide sequences that act to increase the expression of a promoter region. Enhancers are known in the art and include the SV40 enhancer region, the 35S enhancer element and the like. Some enhancers are also known to alter normal promoter expression patterns, for example, by causing a promoter to be expressed constitutively when without the enhancer, the same promoter is expressed only in one specific tissue or a few specific tissues.

[0150] Generally, a “weak promoter” means a promoter that drives expression of a coding sequence at a low level. A “low level” of expression is intended to mean expression at levels of about 1/10,000 transcripts to about 1/100,000 transcripts to about 1/500,000 transcripts. Conversely, a strong promoter drives expression of a coding sequence at a high level, or at about 1/10 transcripts to about 1/100 transcripts to about 1/1,000 transcripts.

[0151] It is recognized that sequences useful in the methods of the disclosure may be used with their native coding sequences thereby resulting in a change in phenotype of the transformed plant. The morphogenic genes and genes of interest disclosed herein, as well as variants and fragments thereof, are useful in the methods of the disclosure for the genetic manipulation of any plant. The term “operably linked” means that the transcription or translation of a heterologous nucleotide sequence is under the influence of a promoter sequence.

[0152] In one aspect of the disclosure, expression cassettes comprise a transcriptional initiation region or variants or fragments thereof, operably linked to a morphogenic gene and/or a heterologous nucleotide sequence. Such expression cassettes can be provided with a plurality of restriction sites for insertion of the nucleotide sequence to be under the transcriptional regulation of the regulatory regions. The expression cassettes may additionally contain selectable marker genes as well as 3′ termination regions.

[0153] The expression cassettes can include, in the 5′-3′ direction of transcription, a transcriptional initiation region (i.e., a promoter, or variant or fragment thereof), a translational initiation region, a morphogenic gene and/or a heterologous nucleotide sequence of interest, a translational termination region and optionally, a transcriptional termination region functional in the host organism. The regulatory regions (i.e., promoters, transcriptional regulatory regions, and translational termination regions), the morphogenic gene and/or the polynucleotide of interest useful in the methods of the disclosure may be native/analogous to the host cell or to each other. Alternatively, the regulatory regions, morphogenic gene and/or the polynucleotide of interest may be heterologous to the host cell or to each other. As used herein, “heterologous” in reference to a sequence is a sequence that originates from a foreign species or, if from the same species, is substantially modified from its native form in composition and/or genomic locus by deliberate human intervention. For example, a promoter operably linked to a heterologous polynucleotide is from a species different from the species from which the polynucleotide was derived or, if from the same/analogous species, one or both are substantially modified from their original form and/or genomic locus or the promoter is not the native promoter for the operably linked polynucleotide.

[0154] The termination region may be native with the transcriptional initiation region, may be native with the operably linked morphogenic gen and/or may be native with the operably linked DNA sequence of interest, may be native with the plant host, or may be derived from another source (i.e., foreign or heterologous to the promoter, the morphogenic gene and/or the DNA sequence being expressed, the plant host, or any combination thereof). Convenient termination regions are available from the Ti-plasmid of A. tumefaciens, such as the octopine synthase and nopaline synthase termination regions. See also, Guerineau, et al., (1991) Mol. Gen. Genet. 262:141-144; Proudfoot, (1991) Cell 64:671-674; Sanfacon, et al., (1991) Genes Dev. 5:141-149; Mogen, et al., (1990) Plant Cell 2:1261-1272; Munroe, et al., (1990) Gene 91:151-158; Ballas, et al., (1989) Nucleic Acids Res. 17:7891-7903; and Joshi, et al., (1987) Nucleic Acid Res. 15:9627-9639, herein incorporated by reference in their entirety.

[0155] The expression cassette comprising a promoter operably linked to a morphogenic gene and/or optionally further operably linked to a heterologous nucleotide sequence, a heterologous polynucleotide of interest, a heterologous polynucleotide nucleotide, or a sequence of interest can be used to transform any plant. Alternatively, a heterologous polynucleotide of interest, a heterologous polynucleotide nucleotide, or a sequence of interest operably linked to a promoter can be on a separate expression cassette positioned outside of the transfer-DNA. In this manner, genetically modified plants, plant cells, plant tissue, seed, root and the like can be obtained. The expression cassette comprising the sequences of the present disclosure may also contain at least one additional nucleotide sequence for a gene, heterologous nucleotide sequence, heterologous polynucleotide of interest, or heterologous polynucleotide to be cotransformed into the organism. Alternatively, the additional nucleotide sequence(s) can be provided on another expression cassette.

[0156] Where appropriate, the nucleotide sequences whose expression is to be under the control a promoter sequence and any additional nucleotide sequence(s) may be optimized for increased expression in the transformed plant. That is, these nucleotide sequences can be synthesized using plant preferred codons for improved expression. See, for example, Campbell and Gowri, (1990) Plant Physiol. 92:1-11, herein incorporated by reference in its entirety, for a discussion of host-preferred codon usage. Methods are available in the art for synthesizing plant-preferred genes. See, for example, U.S. Pat. Nos. 5,380,831, 5,436,391 and Murray, et al., (1989) Nucleic Acids Res. 17:477-498, herein incorporated by reference in their entirety.

[0157] Additional sequence modifications are known to enhance gene expression in a cellular host. These include elimination of sequences encoding spurious polyadenylation signals, exon-intron splice site signals, transposon-like repeats and other such well-characterized sequences that may be deleterious to gene expression. The G-C content of a heterologous nucleotide sequence may be adjusted to levels average for a given cellular host, as calculated by reference to known genes expressed in the host cell. When possible, the sequence is modified to avoid predicted hairpin secondary mRNA structures.

[0158] The expression cassettes useful in the methods of the disclosure may additionally contain 5′ leader sequences. Such leader sequences can act to enhance translation. Translation leaders are known in the art and include, without limitation: picornavirus leaders, for example, EMCV leader (Encephalomyocarditis 5′ noncoding region) (Elroy-Stein, et al., (1989) Proc. Nat. Acad. Sci. USA 86:6126-6130); potyvirus leaders, for example, TEV leader (Tobacco Etch Virus) (Allison, et al., (1986) Virology 154:9-20); MDMV leader (Maize Dwarf Mosaic Virus); human immunoglobulin heavy-chain binding protein (BiP) (Macejak, et al., (1991) Nature 353:90-94); untranslated leader from the coat protein mRNA of alfalfa mosaic virus (AMV RNA 4) (Jobling, et al., (1987) Nature 325:622-625); tobacco mosaic virus leader (TMV) (Gallie, et al., (1989) Molecular Biology of RNA, pages 237-256) and maize chlorotic mottle virus leader (MCMV) (Lommel, et al., (1991) Virology 81:382-385), herein incorporated by reference in their entirety. See, also, Della-Cioppa, et al., (1987) Plant Physiology 84:965-968, herein incorporated by reference in its entirety. Methods known to enhance mRNA stability can also be utilized, for example, introns, such as the maize Ubiquitin intron (Christensen and Quail, (1996) Transgenic Res. 5:213-218; Christensen, et al., (1992) Plant Molecular Biology 18:675-689) or the maize AdhI intron (Kyozuka, et al., (1991) Mol. Gen. Genet. 228:40-48; Kyozuka, et al., (1990) Maydica 35:353-357) and the like, herein incorporated by reference in their entirety.

[0159] In preparing expression cassettes useful in the methods of the disclosure, the various DNA fragments may be manipulated, to provide for the DNA sequences in the proper orientation and, as appropriate, in the proper reading frame. Toward this end, adapters or linkers may be employed to join the DNA fragments or other manipulations may be involved to provide for convenient restriction sites, removal of superfluous DNA, removal of restriction sites or the like. For this purpose, in vitro mutagenesis, primer repair, restriction, annealing, resubstitutions, for example, transitions and transversions, may be involved.

[0160] As used herein, “vector” refers to a DNA molecule such as a plasmid, cosmid or bacterial phage for introducing a nucleotide construct, for example, an expression cassette, into a host cell. Cloning vectors typically contain one or a small number of restriction endonuclease recognition sites at which foreign DNA sequences can be inserted in a determinable fashion without loss of essential biological function of the vector, as well as a marker gene that is suitable for use in the identification and selection of cells transformed with the cloning vector. Marker genes typically include genes that provide tetracycline resistance, hygromycin resistance or ampicillin resistance.

[0161] Cells that have been transformed may be grown into plants in accordance with conventional ways. See, for example, McCormick, et al., (1986) Plant Cell Reports 5:81-84, herein incorporated by reference in its entirety. These plants may then be grown, and either pollinated with the same transformed strain or different strains, and the resulting progeny having expression of the desired phenotypic characteristic identified. Two or more generations may be grown to ensure that expression of the desired phenotypic characteristic is stably maintained and inherited and then seeds harvested to ensure expression of the desired phenotypic characteristic has been achieved. In this manner, the present disclosure provides transformed seed (also referred to as “transgenic seed”) having a nucleotide construct useful in the methods of the disclosure, for example, an expression cassette useful in the methods of the disclosure, stably incorporated into its genome.

[0162] There are a variety of methods for the regeneration of plants from plant tissue. The particular method of regeneration will depend on the starting plant tissue and the particular plant species to be regenerated. The regeneration, development and cultivation of plants from single plant protoplast transformants or from various transformed explants is well known in the art (Weissbach and Weissbach, (1988) In: Methods for Plant Molecular Biology, (Eds.), Academic Press, Inc., San Diego, Calif., herein incorporated by reference in its entirety). This regeneration and growth process typically includes the steps of selection of transformed cells, culturing those individualized cells through the usual stages of embryonic development through the rooted plantlet stage. Transgenic embryos and seeds are similarly regenerated. The resulting transgenic rooted shoots are thereafter planted in an appropriate plant growth medium such as soil. Preferably, the regenerated plants are self-pollinated to provide homozygous transgenic plants. Otherwise, pollen obtained from the regenerated plants is crossed to seed-grown plants of agronomically important lines. Conversely, pollen from plants of these important lines is used to pollinate regenerated plants. A transgenic plant produced by the methods of the disclosure containing a desired polynucleotide of interest is cultivated using methods well known to one skilled in the art.

[0163] Methods are known in the art for the targeted insertion of a polynucleotide at a specific location in the plant genome. The insertion of the polynucleotide at a desired genomic location is achieved using a site-specific recombination system. See, for example, WO99/25821, WO99/25854, WO99/25840, WO99/25855 and WO99/25853, all of which are herein incorporated by reference in their entirety. Briefly, a polynucleotide of interest can be contained in transfer cassette flanked by two non-identical recombination sites. The transfer cassette is introduced into a plant having stably incorporated into its genome a target site which is flanked by two non-identical recombination sites that correspond to the sites of the transfer cassette. An appropriate recombinase is provided and the transfer cassette is integrated at the target site. The polynucleotide of interest is thereby integrated at a specific chromosomal position in the plant genome.

[0164] The disclosed methods can be used to introduce into explants polynucleotides that are useful to target a specific site for modification in the genome of a plant derived from the explant. Site specific modifications that can be introduced with the disclosed methods include those produced using any method for introducing site specific modification, including, but not limited to, through the use of gene repair oligonucleotides (e.g. US Publication 2013/0019349), or through the use of double-stranded break technologies such as TALENs, meganucleases, zinc finger nucleases, CRISPR-Cas, and the like. For example, the disclosed methods can be used to introduce a CRISPR-Cas system into a plant cell or plant, for the purpose of genome modification of a target sequence in the genome of a plant or plant cell, for selecting plants, for deleting a base or a sequence, for gene editing, and for inserting a polynucleotide of interest into the genome of a plant or plant cell. Thus, the disclosed methods can be used together with a CRISPR-Cas system to provide for an effective system for modifying or altering target sites and nucleotides of interest within the genome of a plant, plant cell or seed. The Cas endonuclease gene is a plant optimized Cas9 endonuclease, wherein the plant optimized Cas9 endonuclease is capable of binding to and creating a double strand break in a genomic target sequence of the plant genome.

[0165] The Cas endonuclease is guided by the guide nucleotide to recognize and optionally introduce a double strand break at a specific target site into the genome of a cell. The CRISPR-Cas system provides for an effective system for modifying target sites within the genome of a plant, plant cell or seed. Further provided are methods employing a guide polynucleotide/Cas endonuclease system to provide an effective system for modifying target sites within the genome of a cell and for editing a nucleotide sequence in the genome of a cell. Once a genomic target site is identified, a variety of methods can be employed to further modify the target sites such that they contain a variety of polynucleotides of interest. The disclosed methods can be used to introduce a CRISPR-Cas system for editing a nucleotide sequence in the genome of a cell. The nucleotide sequence to be edited (the nucleotide sequence of interest) can be located within or outside a target site that is recognized by a Cas endonuclease.

[0166] CRISPR loci (Clustered Regularly Interspaced Short Palindromic Repeats) (also known as SPIDRs-SPacer Interspersed Direct Repeats) constitute a family of recently described DNA loci. CRISPR loci consist of short and highly conserved DNA repeats (typically 24 to 40 bp, repeated from 1 to 140 times—also referred to as CRISPR-repeats) which are partially palindromic. The repeated sequences (usually specific to a species) are interspaced by variable sequences of constant length (typically 20 to 58 by depending on the CRISPR locus (WO2007/025097 published Mar. 1, 2007).

[0167] CRISPR loci were first recognized in E. coli (Ishino et al. (1987) J. Bacterial. 169:5429-5433; Nakata et al. (1989) J. Bacterial. 171:3553-3556). Similar interspersed short sequence repeats have been identified in Haloferax mediterranei, Streptococcus pyogenes, Anabaena, and Mycobacterium tuberculosis (Groenen et al. (1993) Mol. Microbiol. 10:1057-1065; Hoe et al. (1999) Emerg. Infect. Dis. 5:254-263; Masepohl et al. (1996) Biochim. Biophys. Acta 1307:26-30; Mojica et al. (1995) Mol. Microbiol. 17:85-93). The CRISPR loci differ from other SSRs by the structure of the repeats, which have been termed short regularly spaced repeats (SRSRs) (Janssen et al. (2002) OMICS J. Integ. Biol. 6:23-33; Mojica et al. (2000) Mol. Microbiol. 36:244-246). The repeats are short elements that occur in clusters, that are always regularly spaced by variable sequences of constant length (Mojica et al. (2000) Mol. Microbiol. 36:244-246).

[0168] Cas gene includes a gene that is generally coupled, associated or close to or in the vicinity of flanking CRISPR loci. The terms “Cas gene” and “CRISPR-associated (Cas) gene” are used interchangeably herein. A comprehensive review of the Cas protein family is presented in Haft et al. (2005) Computational Biology, PLoS Comput Biol 1 (6): e60. doi:10.1371/journal.pcbi.0010060.

[0169] In addition to the four initially described gene families, an additional 41 CRISPR-associated (Cas) gene families have been described in US Patent Application Publication Number 2015/0059010, which is incorporated herein by reference. This reference shows that CRISPR systems belong to different classes, with different repeat patterns, sets of genes, and species ranges. The number of Cas genes at a given CRISPR locus can vary between species. Cas endonuclease relates to a Cas protein encoded by a Cas gene, wherein the Cas protein is capable of introducing a double strand break into a DNA target sequence. The Cas endonuclease is guided by the guide polynucleotide to recognize and optionally introduce a double strand break at a specific target site into the genome of a cell. As used herein, the term “guide polynucleotide/Cas endonuclease system” includes a complex of a Cas endonuclease and a guide polynucleotide that is capable of introducing a double strand break into a DNA target sequence. The Cas endonuclease unwinds the DNA duplex in close proximity of the genomic target site and cleaves both DNA strands upon recognition of a target sequence by a guide nucleotide, but only if the correct protospacer-adjacent motif (PAM) is approximately oriented at the 3′ end of the target sequence (see FIG. 2A and FIG. 2B of US Patent Application Publication Number 2015/0059010).

[0170] In an aspect, the Cas endonuclease gene is a Cas9 endonuclease, such as, but not limited to, Cas9 genes listed in SEQ ID NOs: 462, 474, 489, 494, 499, 505, and 518 of WO2007/025097, published Mar. 1, 2007, and incorporated herein by reference. In another aspect, the Cas endonuclease gene is plant, maize or soybean optimized Cas9 endonuclease, such as, but not limited to those shown in FIG. 1A of US Patent Application Publication Number 2015/0059010.

[0171] In another aspect, the Cas endonuclease gene is operably linked to a SV40 nuclear targeting signal upstream of the Cas codon region and a bipartite VirD2 nuclear localization signal (Tinland et al. (1992) Proc. Natl. Acad. Sci. USA 89:7442-6) downstream of the Cas codon region.

[0172] In an aspect, the Cas endonuclease gene is a Cas9 endonuclease gene of SEQ ID NO:1, 124, 212, 213, 214, 215, 216, 193 or nucleotides 2037-6329 of SEQ ID NO:5, or any functional fragment or variant thereof, of US Patent Application Publication Number 2015/0059010.

[0173] As related to the Cas endonuclease, the terms “functional fragment,” “fragment that is functionally equivalent,” and “functionally equivalent fragment” are used interchangeably herein. These terms refer to a portion or subsequence of the Cas endonuclease sequence in which the ability to create a double-strand break is retained.

[0174] As related to the Cas endonuclease, the terms “functional variant,” “variant that is functionally equivalent” and “functionally equivalent variant” are used interchangeably herein. These terms refer to a variant of the Cas endonuclease in which the ability to create a double-strand break is retained. Fragments and variants can be obtained via methods such as site-directed mutagenesis and synthetic construction.

[0175] In an aspect, the Cas endonuclease gene is a plant codon optimized Streptococcus pyogenes Cas9 gene that can recognize any genomic sequence of the form N(12-30)NGG which can in principle be targeted.

[0176] Endonucleases are enzymes that cleave the phosphodiester bond within a polynucleotide chain, and include restriction endonucleases that cleave DNA at specific sites without damaging the bases. Restriction endonucleases include Type I, Type II, Type III, and Type IV endonucleases, which further include subtypes. In the Type I and Type III systems, both the methylase and restriction activities are contained in a single complex. Endonucleases also include meganucleases, also known as homing endonucleases (HEases), which like restriction endonucleases, bind and cut at a specific recognition site, however the recognition sites for meganucleases are typically longer, about 18 bp or more (Patent application PCT/US 12/30061 filed on Mar. 22, 2012). Meganucleases have been classified into four families based on conserved sequence motifs. These motifs participate in the coordination of metal ions and hydrolysis of phosphodiester bonds. Meganucleases are notable for their long recognition sites, and for tolerating some sequence polymorphisms in their DNA substrates. The naming convention for meganuclease is similar to the convention for other restriction endonuclease. Meganucleases are also characterized by prefix F-, I-, or PI- for enzymes encoded by free-standing ORFs, introns, and inteins, respectively. One step in the recombination process involves polynucleotide cleavage at or near the recognition site. This cleaving activity can be used to produce a double-strand break. For reviews of site-specific recombinases and their recognition sites, see, Sauer (1994) Curr Op Biotechnol 5:521-7; and Sadowski (1993) FASEB 7:760-7. In some examples the recombinase is from the Integrase or Resolvase families. TAL effector nucleases are a new class of sequence-specific nucleases that can be used to make double-strand breaks at specific target sequences in the genome of a plant or other organism. (Miller, et al. (2011) Nature Biotechnology 29:143-148). Zinc finger nucleases (ZFNs) are engineered double-strand break inducing agents comprised of a zinc finger DNA binding domain and a double-strand-break-inducing agent domain. Recognition site specificity is conferred by the zinc finger domain, which typically comprising two, three, or four zinc fingers, for example having a C2H2 structure, however other zinc finger structures are known and have been engineered. Zinc finger domains are amenable for designing polypeptides which specifically bind a selected polynucleotide recognition sequence. ZFNs include an engineered DNA-binding zinc finger domain linked to a nonspecific endonuclease domain, for example nuclease domain from a Type Ms endonuclease such as Fokl. Additional functionalities can be fused to the zinc-finger binding domain, including transcriptional activator domains, transcription repressor domains, and methylases. In some examples, dimerization of nuclease domain is required for cleavage activity. Each zinc finger recognizes three consecutive base pairs in the target DNA. For example, a 3-finger domain recognized a sequence of 9 contiguous nucleotides, with a dimerization requirement of the nuclease, two sets of zinc finger triplets are used to bind an 18 nucleotide recognition sequence.

[0177] A “Dead-CAS9” (dCAS9) as used herein, is used to supply a transcriptional repressor domain. The dCAS9 has been mutated so that can no longer cut DNA. The dCASO can still bind when guided to a sequence by the gRNA and can also be fused to repressor elements (see Gilbert et al., Cell 2013 Jul. 18; 154(2): 442-451, Kiani et al., 2015 November Nature Methods Vol. 12 No. 11: 1051-1054). The dCAS9 fused to the repressor element, as described herein, is abbreviated to dCAS9˜REP, where the repressor element (REP) can be any of the known repressor motifs that have been characterized in plants (see Kagale and Rozxadowski, 20010 Plant Signaling & Behavior 5:6, 691-694 for review). An expressed guide RNA (gRNA) binds to the dCAS9˜REP protein and targets the binding of the dCAS9-REP fusion protein to a specific predetermined nucleotide sequence within a promoter (a promoter within the T-DNA). For example, if this is expressed Beyond-the Border using a ZM-UBI PRO::dCAS9˜REP::PINII TERM cassette along with a U6-POL PRO::gRNA::U6 TERM cassette and the gRNA is designed to guide the dCAS9-REP protein to bind the SB-UBI promoter in the expression cassette SB-UBI PRO::moPAT::PINII TERM within the T-DNA, any event that has integrated the Beyond-the-Border sequence would be bialaphos sensitive. Transgenic events that integrate only the T-DNA would express moPAT and be bialaphos resistant. The advantage of using a dCAS9 protein fused to a repressor (as opposed to a TETR or ESR) is the ability to target these repressors to any promoter within the T-DNA. TETR and ESR are restricted to cognate operator binding sequences. Alternatively, a synthetic Zinc-Finger Nuclease fused to a repressor domain can be used in place of the gRNA and dCAS9-REP (Urritia et al., 2003, Genome Biol. 4:231) as described above.

[0178] Bacteria and archaea have evolved adaptive immune defenses termed clustered regularly interspaced short palindromic repeats (CRISPR)/CRISPR-associated (Cas) systems that use short RNA to direct degradation of foreign nucleic acids ((WO2007/025097 published Mar. 1, 2007). The type II CRISPR/Cas system from bacteria employs a crRNA and tracrRNA to guide the Cas endonuclease to its DNA target. The crRNA (CRISPR RNA) contains the region complementary to one strand of the double strand DNA target and base pairs with the tracrRNA (trans-activating CRISPR RNA) forming a RNA duplex that directs the Cas endonuclease to cleave the DNA target.

[0179] As used herein, the term “guide nucleotide” relates to a synthetic fusion of two RNA molecules, a crRNA (CRISPR RNA) comprising a variable targeting domain, and a tracrRNA. In an aspect, the guide nucleotide comprises a variable targeting domain of 12 to 30 nucleotide sequences and a RNA fragment that can interact with a Cas endonuclease.

[0180] As used herein, the term “guide polynucleotide” relates to a polynucleotide sequence that can form a complex with a Cas endonuclease and enables the Cas endonuclease to recognize and optionally cleave a DNA target site. The guide polynucleotide can be a single molecule or a double molecule. The guide polynucleotide sequence can be a RNA sequence, a DNA sequence, or a combination thereof (a RNA-DNA combination sequence). Optionally, the guide polynucleotide can comprise at least one nucleotide, phosphodiester bond or linkage modification such as, but not limited, to Locked Nucleic Acid (LNA), 5-methyl dC, 2,6-Diaminopurine, 2′-Fluoro A, 2′-Fluoro U, 2′-O-Methyl RNA, phosphorothioate bond, linkage to a cholesterol molecule, linkage to a polyethylene glycol molecule, linkage to a spacer 18 (hexaethylene glycol chain) molecule, or 5′ to 3′ covalent linkage resulting in circularization. A guide polynucleotide that solely comprises ribonucleic acids is also referred to as a “guide nucleotide”.

[0181] The guide polynucleotide can be a double molecule (also referred to as duplex guide polynucleotide) comprising a first nucleotide sequence domain (referred to as Variable Targeting domain or VT domain) that is complementary to a nucleotide sequence in a target DNA and a second nucleotide sequence domain (referred to as Cas endonuclease recognition domain or CER domain) that interacts with a Cas endonuclease polypeptide. The CER domain of the double molecule guide polynucleotide comprises two separate molecules that are hybridized along a region of complementarity. The two separate molecules can be RNA, DNA, and/or RNA-DNA-combination sequences. In an aspect, the first molecule of the duplex guide polynucleotide comprising a VT domain linked to a CER domain is referred to as “crDNA” (when composed of a contiguous stretch of DNA nucleotides) or “crRNA” (when composed of a contiguous stretch of RNA nucleotides), or “crDNA-RNA” (when composed of a combination of DNA and RNA nucleotides). The crNucleotide can comprise a fragment of the cRNA naturally occurring in Bacteria and Archaea. In an aspect, the size of the fragment of the cRNA naturally occurring in Bacteria and Archaea that is present in a crNucleotide disclosed herein can range from, but is not limited to, 2, 3, 4, 5, 6, 7, 8, 9,10, 11, 12, 13, 14, 15, 16, 17, 18, 19, 20 or more nucleotides.

[0182] In an aspect, the second molecule of the duplex guide polynucleotide comprising a CER domain is referred to as “tracrRNA” (when composed of a contiguous stretch of RNA nucleotides) or “tracrDNA” (when composed of a contiguous stretch of DNA nucleotides) or “tracrDNA-RNA” (when composed of a combination of DNA and RNA nucleotides. In an aspect, the RNA that guides the RNA Cas9 endonuclease complex, is a duplexed RNA comprising a duplex crRNA-tracrRNA.

[0183] The guide polynucleotide can also be a single molecule comprising a first nucleotide sequence domain (referred to as Variable Targeting domain or VT domain) that is complementary to a nucleotide sequence in a target DNA and a second nucleotide domain (referred to as Cas endonuclease recognition domain or CER domain) that interacts with a Cas endonuclease polypeptide. By “domain” it is meant a contiguous stretch of nucleotides that can be RNA, DNA, and/or RNA-DNA-combination sequence. The VT domain and/or the CER domain of a single guide polynucleotide can comprise a RNA sequence, a DNA sequence, or a RNA-DNA-combination sequence. In an aspect, the single guide polynucleotide comprises a crNucleotide (comprising a VT domain linked to a CER domain) linked to a tracrNucleotide (comprising a CER domain), wherein the linkage is a nucleotide sequence comprising a RNA sequence, a DNA sequence, or a RNA-DNA combination sequence. The single guide polynucleotide being comprised of sequences from the crNucleotide and tracrNucleotide may be referred to as “single guide nucleotide” (when composed of a contiguous stretch of RNA nucleotides) or “single guide DNA” (when composed of a contiguous stretch of DNA nucleotides) or “single guide nucleotide-DNA” (when composed of a combination of RNA and DNA nucleotides). In an aspect of the disclosure, the single guide nucleotide comprises a cRNA or cRNA fragment and a tracrRNA or tracrRNA fragment of the type II CRISPR/Cas system that can form a complex with a type II Cas endonuclease, wherein the guide nucleotide Cas endonuclease complex can direct the Cas endonuclease to a plant genomic target site, enabling the Cas endonuclease to introduce a double strand break into the genomic target site. One aspect of using a single guide polynucleotide versus a duplex guide polynucleotide is that only one expression cassette needs to be made to express the single guide polynucleotide.

[0184] The term “variable targeting domain” or “VT domain” is used interchangeably herein and includes a nucleotide sequence that is complementary to one strand (nucleotide sequence) of a double strand DNA target site. The % complementation between the first nucleotide sequence domain (VT domain) and the target sequence can be at least 50%, 51%, 52%, 53%, 54%, 55%, 56%, 57%, 58%, 59%, 60%, 61%, 62%, 63%, 63%, 65%, 66%, 67%, 68%, 69%, 70%, 71%, 72%, 73%, 74%, 75%, 76%, 77%, 78%, 79%, 80%, 81%, 82%, 83%, 84%, 85%, 86%, 87%, 88%, 89%, 90%, 91%, 92%, 93%, 94%, 95%, 96%, 97%, 98%, 99% or 100%. The variable target domain can be at least 12, 13, 14, 15, 16, 17, 18, 19, 20, 21, 22, 23, 24, 25, 26, 27, 28, 29 or 30 nucleotides in length. In an aspect, the variable targeting domain comprises a contiguous stretch of 12 to 30 nucleotides. The variable targeting domain can be composed of a DNA sequence, a RNA sequence, a modified DNA sequence, a modified RNA sequence, or any combination thereof

[0185] The term “Cas endonuclease recognition domain” or “CER domain” of a guide polynucleotide is used interchangeably herein and includes a nucleotide sequence (such as a second nucleotide sequence domain of a guide polynucleotide), that interacts with a Cas endonuclease polypeptide. The CER domain can be composed of a DNA sequence, a RNA sequence, a modified DNA sequence, a modified RNA sequence (see for example modifications described herein), or any combination thereof.

[0186] The nucleotide sequence linking the crNucleotide and the tracrNucleotide of a single guide polynucleotide can comprise a RNA sequence, a DNA sequence, or a RNA-DNA combination sequence. In an aspect, the nucleotide sequence linking the crNucleotide and the tracrNucleotide of a single guide polynucleotide can be at least 3, 4, 5, 6, 7, 8, 9, 10, 11, 12, 13, 14, 15, 16, 17, 18, 19, 20, 21, 22, 23, 24, 25, 26, 27, 28, 29, 30, 31, 32, 33, 34, 35, 36, 37, 38, 39, 40, 41, 42, 43, 44, 45, 46, 47, 48, 49, 50, 51, 52, 53, 54, 55, 56, 57, 58, 59, 60, 61, 62, 63, 64, 65, 66, 67, 68, 69, 70, 71, 72, 73, 74, 75, 76, 77, 78, 78, 79, 80, 81, 82, 83, 84, 85, 86, 87, 88, 89, 90, 91, 92, 93, 94, 95, 96, 97, 98, 99 or 100 nucleotides in length. In another aspect, the nucleotide sequence linking the crNucleotide and the tracrNucleotide of a single guide polynucleotide can comprise a tetraloop sequence, such as, but not limiting to a GAAA tetraloop sequence.

[0187] Nucleotide sequence modification of the guide polynucleotide, VT domain and/or CER domain can be selected from, but not limited to, the group consisting of a 5′ cap, a 3′ polyadenylated tail, a riboswitch sequence, a stability control sequence, a sequence that forms a dsRNA duplex, a modification or sequence that targets the guide poly nucleotide to a subcellular location, a modification or sequence that provides for tracking, a modification or sequence that provides a binding site for proteins, a Locked Nucleic Acid (LNA), a 5-methyl dC nucleotide, a 2,6-Diaminopurine nucleotide, a 2′-Fluoro A nucleotide, a 2′-Fluoro U nucleotide; a 2′-O-Methyl RNA nucleotide, a phosphorothioate bond, linkage to a cholesterol molecule, linkage to a polyethylene glycol molecule, linkage to a spacer 18 molecule, a 5′ to 3′ covalent linkage, or any combination thereof. These modifications can result in at least one additional beneficial feature, wherein the additional beneficial feature is selected from the group of a modified or regulated stability, a subcellular targeting, tracking, a fluorescent label, a binding site for a protein or protein complex, modified binding affinity to complementary target sequence, modified resistance to cellular degradation, and increased cellular permeability.

[0188] In an aspect, the guide nucleotide and Cas endonuclease are capable of forming a complex that enables the Cas endonuclease to introduce a double strand break at a DNA target site.

[0189] In an aspect of the disclosure the variable target domain is 12, 13, 14, 15, 16, 17, 18, 19, 20, 21, 22, 23, 24, 25, 26, 27, 28, 29 or 30 nucleotides in length.

[0190] In an aspect of the disclosure, the guide nucleotide comprises a cRNA (or cRNA fragment) and a tracrRNA (or tracrRNA fragment) of the type II CRISPR/Cas system that can form a complex with a type II Cas endonuclease, wherein the guide nucleotide Cas endonuclease complex can direct the Cas endonuclease to a plant genomic target site, enabling the Cas endonuclease to introduce a double strand break into the genomic target site. The guide nucleotide can be introduced into a plant or plant cell directly using any method known in the art such as, but not limited to, particle bombardment or topical applications.

[0191] In an aspect, the guide nucleotide can be introduced indirectly by introducing a recombinant DNA molecule comprising the corresponding guide DNA sequence operably linked to a plant specific promoter that is capable of transcribing the guide nucleotide in the plant cell. The term “corresponding guide DNA” includes a DNA molecule that is identical to the RNA molecule but has a “T” substituted for each “U” of the RNA molecule.

[0192] In an aspect, the guide nucleotide is introduced via particle bombardment or using the disclosed methods for Agrobacterium transformation of a recombinant DNA construct comprising the corresponding guide DNA operably linked to a plant U6 polymerase III promoter.

[0193] In an aspect, the RNA that guides the RNA Cas9 endonuclease complex, is a duplexed RNA comprising a duplex crRNA-tracrRNA. One advantage of using a guide nucleotide versus a duplexed crRNA-tracrRNA is that only one expression cassette needs to be made to express the fused guide nucleotide.

[0194] The terms “target site,” “target sequence,” “target DNA,” “target locus,” “genomic target site,” “genomic target sequence,” and “genomic target locus” are used interchangeably herein and refer to a polynucleotide sequence in the genome (including choloroplastic and mitochondrial DNA) of a plant cell at which a double-strand break is induced in the plant cell genome by a Cas endonuclease. The target site can be an endogenous site in the plant genome, or alternatively, the target site can be heterologous to the plant and thereby not be naturally occurring in the genome, or the target site can be found in a heterologous genomic location compared to where it occurs in nature.

[0195] As used herein, terms “endogenous target sequence” and “native target sequence” are used interchangeably herein to refer to a target sequence that is endogenous or native to the genome of a plant and is at the endogenous or native position of that target sequence in the genome of the plant. In an aspect, the target site can be similar to a DNA recognition site or target site that that is specifically recognized and/or bound by a double-strand break inducing agent such as a LIG3-4 endonuclease (US Patent Application Publication Number 2009/0133152) or a MS26++ meganuclease (US Patent Application Publication Number 2014/0020131).

[0196] An “artificial target site” or “artificial target sequence” are used interchangeably herein and refer to a target sequence that has been introduced into the genome of a plant. Such an artificial target sequence can be identical in sequence to an endogenous or native target sequence in the genome of a plant but be located in a different position (i.e., a non-endogenous or non-native position) in the genome of a plant.

[0197] An “altered target site,” “altered target sequence” “modified target site,” and “modified target sequence” are used interchangeably herein and refer to a target sequence as disclosed herein that comprises at least one alteration when compared to non-altered target sequence. Such “alterations” include, for example: (i) replacement of at least one nucleotide, (ii) a deletion of at least one nucleotide, (iii) an insertion of at least one nucleotide, or (iv) any combination of (i)-(iii).

[0198] In an aspect, the disclosed methods can be used to introduce into plants polynucleotides useful for gene suppression of a target gene in a plant. Reduction of the activity of specific genes (also known as gene silencing, or gene suppression) is desirable for several aspects of genetic engineering in plants. Many techniques for gene silencing are well known to one of skill in the art, including but not limited to antisense technology (see, e.g., Sheehy et al. (1988) Proc. Natl. Acad. Sci. USA 85:8805-8809; and U.S. Pat. Nos. 5,107,065; 5,453,566; and 5,759,829); cosuppression (e.g., Taylor (1997) Plant Cell 9:1245; Jorgensen (1990) Trends Biotech. 8(12):340-344; Flavell (1994) Proc. Natl. Acad. Sci. USA 91:3490-3496; Finnegan et al. (1994) Bio/Technology 12: 883-888; and Neuhuber et al. (1994) Mol. Gen. Genet. 244:230-241); RNA interference (Napoli et al. (1990) Plant Cell 2:279-289; U.S. Pat. No. 5,034,323; Sharp (1999) Genes Dev. 13:139-141; Zamore et al. (2000) Cell 101:25-33; Javier (2003) Nature 425:257-263; and, Montgomery et al. (1998) Proc. Natl. Acad. Sci. USA 95:15502-15507), virus-induced gene silencing (Burton, et al. (2000) Plant Cell 12:691-705; and Baulcombe (1999) Curr. Op. Plant Bio. 2:109-113); target-RNA-specific ribozymes (Haseloff et al. (1988) Nature 334: 585-591); hairpin structures (Smith et al. (2000) Nature 407:319-320; WO 99/53050; WO 02/00904; and WO 98/53083); ribozymes (Steinecke et al. (1992) EMBO J. 11:1525; U.S. Pat. No. 4,987,071; and, Perriman et al. (1993) Antisense Res. Dev. 3:253); oligonucleotide mediated targeted modification (e.g., WO 03/076574 and WO 99/25853); Zn-finger targeted molecules (e.g., WO 01/52620; WO 03/048345; and WO 00/42219); artificial micro RNAs (U.S. Pat. No. 8,106,180; Schwab et al. (2006) Plant Cell 18:1121-1133); and other methods or combinations of the above methods known to those of skill in the art.

[0199] In an aspect, the disclosed methods can be used to introduce into plants polynucleotides useful for the targeted integration of nucleotide sequences into a plant. For example, the disclosed methods can be used to introduce transfer cassettes comprising nucleotide sequences of interest flanked by non-identical recombination sites are used to transform a plant comprising a target site. In an aspect, the target site contains at least a set of non-identical recombination sites corresponding to those on the transfer cassette. The exchange of the nucleotide sequences flanked by the recombination sites is affected by a recombinase. Thus, the disclosed methods can be used for the introduction of transfer cassettes for targeted integration of nucleotide sequences, wherein the transfer cassettes which are flanked by non-identical recombination sites recognized by a recombinase that recognizes and implements recombination at the nonidentical recombination sites. Accordingly, the disclosed methods and composition can be used to improve efficiency and speed of development of plants containing non-identical recombination sites.

[0200] Thus, the disclosed methods can further comprise methods for the directional, targeted integration of exogenous nucleotides into a transformed plant. In an aspect, the disclosed methods use novel recombination sites in a gene targeting system which facilitates directional targeting of desired genes and nucleotide sequences into corresponding recombination sites previously introduced into the target plant genome.

[0201] In an aspect, a nucleotide sequence flanked by two non-identical recombination sites is introduced into one or more cells of an explant derived from the target organism's genome establishing a target site for insertion of nucleotide sequences of interest. Once a stable plant or cultured tissue is established a second construct, or nucleotide sequence of interest, flanked by corresponding recombination sites as those flanking the target site, is introduced into the stably transformed plant or tissues in the presence of a recombinase protein. This process results in exchange of the nucleotide sequences between the non-identical recombination sites of the target site and the transfer cassette.

[0202] It is recognized that the transformed plant prepared in this manner may comprise multiple target sites; i. e., sets of non-identical recombination sites. In this manner, multiple manipulations of the target site in the transformed plant are available. By target site in the transformed plant is intended a DNA sequence that has been inserted into the transformed plant's genome and comprises non-identical recombination sites.

[0203] Examples of recombination sites for use in the disclosed method are known in the art and include FRT sites (See, for example, Schlake and Bode (1994) Biochemistry 33: 12746-12751; Huang et al. (1991) Nucleic Acids Research 19: 443-448; Paul D. Sadowski (1995) In Progress in Nucleic Acid Research and Molecular Biology vol. 51, pp. 53-91; Michael M. Cox (1989) In Mobile DNA, Berg and Howe (eds) American Society of Microbiology, Washington D. C., pp. 116-670; Dixon et al. (1995) 18: 449-458; Umlauf and Cox (1988) The EMBO Journal 7: 1845-1852; Buchholz et al. (1996) Nucleic Acids Research 24: 3118-3119; Kilby et al. (1993) Trends Genet. 9: 413-421: Rossant and Geagy (1995) Nat. Med. 1: 592-594; Albert et al. (1995) The Plant J. 7: 649-659: Bayley et al. (1992) Plant Mol. Biol. 18: 353-361; Odell et al. (1990) Mol. Gen. Genet. 223: 369-378; and Dale and Ow (1991) Proc. Natl. Acad. Sci. USA 88: 10558-105620; all of which are herein incorporated by reference.); Lox (Albert et al. (1995) Plant J. 7: 649-659; Qui et al. (1994) Proc. Natl. Acad. Sci. USA 91: 1706-1710; Stuurman et al. (1996) Plant Mol. Biol. 32: 901-913; Odell et al. (1990) Mol. Gen. Gevet. 223: 369-378; Dale et al. (1990) Gene 91: 79-85; and Bayley et al. (1992) Plant Mol. Biol. 18: 353-361.) The two-micron plasmid found in most naturally occurring strains of Saccharomyces cerevisiae, encodes a site-specific recombinase that promotes an inversion of the DNA between two inverted repeats. This inversion plays a central role in plasmid copy-number amplification.

[0204] The protein, designated FLP protein, catalyzes site-specific recombination events. The minimal recombination site (FRT) has been defined and contains two inverted 13-base pair (bp) repeats surrounding an asymmetric 8-bp spacer. The FLP protein cleaves the site at the junctions of the repeats and the spacer and is covalently linked to the DNA via a 3′phosphate. Site specific recombinases like FLP cleave and religate DNA at specific target sequences, resulting in a precisely defined recombination between two identical sites. To function, the system needs the recombination sites and the recombinase. No auxiliary factors are needed. Thus, the entire system can be inserted into and function in plant cells. The yeast FLP\FRT site specific recombination system has been shown to function in plants. To date, the system has been utilized for excision of unwanted DNA. See, Lyznik et al. (1993) Nucleic Acid Res. 21: 969-975. In contrast, the present disclosure utilizes non-identical FRTs for the exchange, targeting, arrangement, insertion and control of expression of nucleotide sequences in the plant genome.

[0205] In an aspect, a transformed organism of interest, such as an explant from a plant, containing a target site integrated into its genome is needed. The target site is characterized by being flanked by non-identical recombination sites. A targeting cassette is additionally required containing a nucleotide sequence flanked by corresponding non-identical recombination sites as those sites contained in the target site of the transformed organism. A recombinase which recognizes the non-identical recombination sites and catalyzes site-specific recombination is required.

[0206] It is recognized that the recombinase can be provided by any means known in the art. That is, it can be provided in the organism or plant cell by transforming the organism with an expression cassette capable of expressing the recombinase in the organism, by transient expression, or by providing messenger RNA (mRNA) for the recombinase or the recombinase protein.

[0207] By “non-identical recombination sites” it is intended that the flanking recombination sites are not identical in sequence and will not recombine or recombination between the sites will be minimal. That is, one flanking recombination site may be a FRT site where the second recombination site may be a mutated FRT site. The non-identical recombination sites used in the methods of the disclosure prevent or greatly suppress recombination between the two flanking recombination sites and excision of the nucleotide sequence contained therein. Accordingly, it is recognized that any suitable non-identical recombination sites may be utilized in the disclosure, including FRT and mutant FRT sites, FRT and lox sites, lox and mutant lox sites, as well as other recombination sites known in the art.

[0208] By suitable non-identical recombination site implies that in the presence of active recombinase, excision of sequences between two non-identical recombination sites occurs, if at all, with an efficiency considerably lower than the recombinationally-mediated exchange targeting arrangement of nucleotide sequences into the plant genome. Thus, suitable non-identical sites for use in the disclosure include those sites where the efficiency of recombination between the sites is low; for example, where the efficiency is less than about 30 to about 50%, preferably less than about 10 to about 30%, more preferably less than about 5 to about 10%.

[0209] As noted above, the recombination sites in the targeting cassette correspond to those in the target site of the transformed plant. That is, if the target site of the transformed plant contains flanking non-identical recombination sites of FRT and a mutant FRT, the targeting cassette will contain the same FRT and mutant FRT non-identical recombination sites.

[0210] It is furthermore recognized that the recombinase, which is used in the disclosed methods, will depend upon the recombination sites in the target site of the transformed plant and the targeting cassette. That is, if FRT sites are utilized, the FLP recombinase will be needed. In the same manner, where lox sites are utilized, the Cre recombinase is required. If the non-identical recombination sites comprise both a FRT and a lox site, both the FLP and Cre recombinase will be required in the plant cell.

[0211] The FLP recombinase is a protein which catalyzes a site-specific reaction that is involved in amplifying the copy number of the two-micron plasmid of S. cerevisiae during DNA replication. FLP protein has been cloned and expressed. See, for example, Cox (1993) Proc. Natl. Acad. Sci. U.S.A. 80: 4223-4227. The FLP recombinase for use in the disclosure may be that derived from the genus Saccharomyces. It may be preferable to synthesize the recombinase using plant preferred codons for optimum expression in a plant of interest. See, for example, U.S. application Ser. No. 08/972,258 filed Nov. 18, 1997, entitled “Novel Nucleic Acid Sequence Encoding FLP Recombinase,” herein incorporated by reference.

[0212] The bacteriophage recombinase Cre catalyzes site-specific recombination between two lox sites. The Cre recombinase is known in the art. See, for example, Guo et al. (1997) Nature 389: 40-46; Abremski et al. (1984) J. Biol. Chem. 259: 1509-1514; Chen et al. (1996) Somat. Cell Mol. Genet. 22: 477-488; and Shaikh et al. (1977) J. Biol. Chem. 272: 5695-5702. All of which are herein incorporated by reference. Such Cre sequence may also be synthesized using plant preferred codons.

[0213] Where appropriate, the nucleotide sequences to be inserted in the plant genome may be optimized for increased expression in the transformed plant. Where mammalian, yeast, or bacterial genes are used in the disclosure, they can be synthesized using plant preferred codons for improved expression. It is recognized that for expression in monocots, dicot genes can also be synthesized using monocot preferred codons. Methods are available in the art for synthesizing plant preferred genes. See, for example, U.S. Pat. Nos 5,380,831,5,436,391, and Murray et al. (1989) Nucleic Acids Res. 17: 477-498, herein incorporated by reference. The plant preferred codons may be determined from the codons utilized more frequently in the proteins expressed in the plant of interest. It is recognized that monocot or dicot preferred sequences may be constructed as well as plant preferred sequences for particular plant species. See, for example, EPA 0359472; EPA 0385962; WO 91/16432; Perlak et al. (1991) Proc. Natl. Acad. Sci. USA, 88: 3324-3328; and Murray et al. (1989) Nucleic Acids Research, 17: 477-498. U.S. Pat. Nos. 5,380,831; 5,436,391; and the like, herein incorporated by reference. It is further recognized that all or any part of the gene sequence may be optimized or synthetic. That is, fully optimized or partially optimized sequences may also be used.

[0214] Additional sequence modifications are known to enhance gene expression in a cellular host and can be used in the disclosure. These include elimination of sequences encoding spurious polyadenylation signals, exon-intron splice site signals, transposon-like repeats, and other such well-characterized sequences, which may be deleterious to gene expression. The G-C content of the sequence may be adjusted to levels average for a given cellular host, as calculated by reference to known genes expressed in the host cell. When possible, the sequence is modified to avoid predicted hairpin secondary RNA structures.

[0215] The present disclosure also encompasses novel FLP recombination target sites (FRT). The FRT has been identified as a minimal sequence comprising two 13 base pair repeats, separated by an eight 8 base spacer, as follows: 5′-GAAGTTCCTATTC[TCTAGAAA]GTATAGGAACTTC-3′ (SEQ ID NO: 45) wherein the nucleotides within the brackets indicate the spacer region. The nucleotides in the spacer region can be replaced with a combination of nucleotides, so long as the two 13-base repeats are separated by eight nucleotides. It appears that the actual nucleotide sequence of the spacer is not critical; however, for the practice of the disclosure, some substitutions of nucleotides in the space region may work better than others. The eight-base pair spacer is involved in DNA-DNA pairing during strand exchange. The asymmetry of the region determines the direction of site alignment in the recombination event, which will subsequently lead to either inversion or excision. As indicated above, most of the spacer can be mutated without a loss of function. See, for example, Schlake and Bode (1994) Biochemistry 33: 12746-12751, herein incorporated by reference.

[0216] Novel FRT mutant sites can be used in the practice of the disclosed methods. Such mutant sites may be constructed by PCR-based mutagenesis. Although mutant FRT sites are known (see SEQ ID Nos 2, 3, 4 and 5 of WO1999/025821), it is recognized that other mutant FRT sites may be used in the practice of the disclosure. The present disclosure is not the use of a particular FRT or recombination site, but rather that non-identical recombination sites or FRT sites can be utilized for targeted insertion and expression of nucleotide sequences in a plant genome. Thus, other mutant FRT sites can be constructed and utilized based upon the present disclosure.

[0217] As discussed above, bringing genomic DNA containing a target site with non-identical recombination sites together with a vector containing a transfer cassette with corresponding non-identical recombination sites, in the presence of the recombinase, results in recombination. The nucleotide sequence of the transfer cassette located between the flanking recombination sites is exchanged with the nucleotide sequence of the target site located between the flanking recombination sites. In this manner, nucleotide sequences of interest may be precisely incorporated into the genome of the host.

[0218] It is recognized that many variations of the disclosure can be practiced. For example, target sites can be constructed having multiple non-identical recombination sites. Thus, multiple genes or nucleotide sequences can be stacked or ordered at precise locations in the plant genome. Likewise, once a target site has been established within the genome, additional recombination sites may be introduced by incorporating such sites within the nucleotide sequence of the transfer cassette and the transfer of the sites to the target sequence. Thus, once a target site has been established, it is possible to subsequently add sites, or alter sites through recombination.

[0219] Another variation includes providing a promoter or transcription initiation region operably linked with the target site in an organism. Preferably, the promoter will be 5′ to the first recombination site. By transforming the organism with a transfer cassette comprising a coding region, expression of the coding region will occur upon integration of the transfer cassette into the target site. This aspect provides for a method to select transformed cells, particularly plant cells, by providing a selectable marker sequence as the coding sequence.

[0220] Other advantages of the present system include the ability to reduce the complexity of integration of transgenes or transferred DNA in an organism by utilizing transfer cassettes as discussed above and selecting organisms with simple integration patterns. In the same manner, preferred sites within the genome can be identified by comparing several transformation events. A preferred site within the genome includes one that does not disrupt expression of essential sequences and provides for adequate expression of the transgene sequence.

[0221] The disclosed methods also provide for means to combine multiple cassettes at one location within the genome. Recombination sites may be added or deleted at target sites within the genome.

[0222] Any means known in the art for bringing the three components of the system together may be used in the disclosure. For example, a plant can be stably transformed to harbor the target site in its genome. The recombinase may be transiently expressed or provided. Alternatively, a nucleotide sequence capable of expressing the recombinase may be stably integrated into the genome of the plant. In the presence of the corresponding target site and the recombinase, the transfer cassette, flanked by corresponding non-identical recombination sites, is inserted into the transformed plant's genome.

[0223] Alternatively, the components of the system may be brought together by sexually crossing transformed plants. In this aspect, a transformed plant, parent one, containing a target site integrated in its genome can be sexually crossed with a second plant, parent two, that has been genetically transformed with a transfer cassette containing flanking non-identical recombination sites, which correspond to those in plant one. Either plant one or plant two contains within its genome a nucleotide sequence expressing recombinase. The recombinase may be under the control of a constitutive or inducible promoter. In this manner, expression of recombinase and subsequent activity at the recombination sites can be controlled.

[0224] The disclosed methods are useful in targeting the integration of transferred nucleotide sequences to a specific chromosomal site. The nucleotide sequence may encode any nucleotide sequence of interest. Particular genes of interest include those which provide a readily analyzable functional feature to the host cell and/or organism, such as marker genes, as well as other genes that alter the phenotype of the recipient cells, and the like. Thus, genes effecting plant growth, height, susceptibility to disease, insects, nutritional value, and the like may be utilized in the disclosure. The nucleotide sequence also may encode an ‘antisense’ sequence to turn off or modify gene expression.

[0225] It is recognized that the nucleotide sequences will be utilized in a functional expression unit or cassette. By functional expression unit or cassette is intended, the nucleotide sequence of interest with a functional promoter, and in most instances a termination region. There are various ways to achieve the functional expression unit within the practice of the disclosure. In one aspect of the disclosure, the nucleic acid of interest is transferred or inserted into the genome as a functional expression unit.

[0226] Alternatively, the nucleotide sequence may be inserted into a site within the genome which is 3′ to a promoter region. In this latter instance, the insertion of the coding sequence 3′ to the promoter region is such that a functional expression unit is achieved upon integration. For convenience, for expression in plants, the nucleic acid encoding target sites and the transfer cassettes, including the nucleotide sequences of interest, can be contained within expression cassettes. The expression cassette will comprise a transcriptional initiation region, or promoter, operably linked to the nucleic acid encoding the peptide of interest. Such an expression cassette is provided with a plurality of restriction sites for insertion of the gene or genes of interest to be under the transcriptional regulation of the regulatory regions.

### EXPERIMENTAL

### Example 1: Agrobacterium-Mediated Transformation of Corn

### A. Preparation of Agrobacterium Master Plate.

[0227] Agrobacterium tumefaciens harboring a binary donor vector is streaked out from a −80° C. frozen aliquot onto solid 12R medium and cultured at 28° C. in the dark for 2-3 days to make a master plate.

### B. Growing Agrobacterium on Solid Medium.

[0228] A single colony or multiple colonies of Agrobacterium are picked from the master plate and streaked onto a second plate containing 810K medium and incubated at 28° C. in the dark overnight.

[0229] Agrobacterium infection medium (700A; 5 ml) and 100 mM 3′-5′-Dimethoxy-4′-hydroxyacetophenone (acetosyringone; 5 μL) are added to a 14 ml conical tube in a hood. About 3 full loops of Agrobacterium from the second plate are suspended in the tube and the tube is then vortexed to make an even suspension. The suspension (1 ml) is transferred to a spectrophotometer tube and the optical density (550 nm) of the suspension is adjusted to a reading of about 0.35-1.0. The Agrobacterium concentration is approximately 0.5 to 2.0×10⁹ cfu/mL. The final Agrobacterium suspension is aliquoted into 2 mL microcentrifuge tubes, each containing about 1 mL of the suspension. The suspensions are then used as soon as possible.

### C. Growing Agrobacterium on Liquid Medium.

[0230] Alternatively, Agrobacterium can be prepared for transformation by growing in liquid medium. One day before infection, a 125 ml flask is prepared with 30 ml of 557A medium (10.5 g/l potassium phosphate dibasic, 4.5 g/l potassium phosphate monobasic anhydrous, 1 g/l ammonium sulfate, 0.5 g/l sodium citrate dehydrate, 10 g/l sucrose, 1 mM magnesium sulfate) and 30 μL spectinomycin (50 mg/mL) and 30 μL acetosyringone (20 mg/mL). A half loopful of Agrobacterium from a second plate is suspended into the flasks and placed on an orbital shaker set at 200 rpm and incubated at 28° C. overnight. The Agrobacterium culture is centrifuged at 5000 rpm for 10 min. The supernatant is removed and the Agrobacterium infection medium (700A) with acetosyringone solution is added. The bacteria are resuspended by vortex and the optical density (550 nm) of the Agrobacterium suspension is adjusted to a reading of about 0.35 to 2.0.

### D. Maize Transformation.

[0231] Ears of a maize (Zea mays L.) cultivar are surface-sterilized for 15-20 min in 20% (v/v) bleach (5.25% sodium hypochlorite) plus 1 drop of Tween 20 followed by 3 washes in sterile water. Immature embryos (IEs) are isolated from ears and placed in 2 ml of the Agrobacterium infection medium (700A) with acetosyringone solution. The optimal size of the embryos varies based on the inbred, but for transformation with WUS2 and ODP2 a wide size range of immature embryo sizes can be used. The Agrobacterium infection medium (810K) is drawn off and 1 ml of the Agrobacterium suspension is added to the embryos and the tube is vortexed for 5-10 sec. The microfuge tube is allowed to stand for 5 min in the hood. The suspension of Agrobacterium and embryos is poured onto 710I (or 562V) co-cultivation medium (see Table 10). Any embryos left in the tube are transferred to the plate using a sterile spatula. The Agrobacterium suspension is drawn off and the embryos placed axis side down on the media. The plate is incubated in the dark at 21° C. for 1-3 days of co-cultivation.

[0232] Embryos are transferred to resting medium (605T medium) without selection (see Table 10). Three to 7 days later, the embryos are transferred to maturation medium (289Q medium) supplemented with a selective agent (see Table 10).

### Example 2: Particle Bombardment for Site-Specific Integration

[0233] Pioneer inbred PH184C (disclosed in U.S. Pat. No. 8,445,763 incorporated herein by reference in its entirety) that contains in chromosome-1 a pre-integrated Site-Specific Integration target site (Chrom-1 target site) composed of UBI PRO:FRT1:NPTII::PINII TERM+FRT87 is used. Prior to bombardment, 10-12 DAP (days after pollination) immature embryos are isolated from ears of Pioneer inbred PH184C and placed on 605J culture medium plus 16% sucrose for three hours to plasmolyze the scutellar cells.

[0234] Four plasmids are typically used for each particle bombardment:
[0235] 1) a donor plasmid (100 ng/μ1) containing a FRT-flanked donor cassette for Recombinase-Mediated Cassette Exchange, for example a plasmid containing FRT1:PMI:PINII TERM+UBI1ZM PRO::DS-RED2::PINII TERM+FRT87 (PHP0004, SEQ ID NO: 17);
[0236] 2) a plasmid (2.5 ng/μ1) containing the expression cassette UBI1ZM PRO::FLPm::PINII TERM (PHP5096, SEQ ID NO: 18);
[0237] 3) a plasmid (10 ng/μ1) containing the expression cassette ZM-PLTP PRO::ZM-ODP2::OS-T28 TERM+FMV & PCSV ENHANCERS (PHP89030, SEQ ID NO: 19); and
[0238] 4) a plasmid (5 ng/μ1) containing the expression cassette ZM-PLTP PRO::ZM-WUS2::IN2-1 TERM (PHP89179, SEQ ID NO: 20).

[0239] To attach the DNA to 0.6 μm gold particles, the four plasmids are mixed by adding 10 μl of each plasmid together in a low-binding microfuge tube (Sorenson Bioscience 39640T) for a total of 40 μl. To this suspension, 50 μl of 0.6 μm gold particles (30 μg/μ1) and 1.0 μl of Transit 20/20 (Cat No MIR5404, Minis Bio LLC) are added, and the suspension is placed on a rotary shaker for 10 minutes. The suspension is centrifuged at 10,000 RPM (˜9400×g) and the supernatant is discarded. The gold particles are re-suspended in 120 μl of 100% ethanol, briefly sonicated at low power and 10 μl is pipetted onto each carrier disc. The carrier discs are then air-dried to remove all remaining ethanol. Particle bombardment is performed using a Biolistics PDF-1000, at 28 inches of Mercury using a 200 PSI rupture disc. After particle bombardment, the immature embryos are selected on 605J medium modified to contain 12.5 g/l mannose and 5 g/l maltose and no sucrose. After 10-12 weeks on selection, plantlets are regenerated and analyzed using qPCR. Co-delivery of PLTP::ODP2 (PHP89030, SEQ ID NO: 19) and PLTP::WUS2 (PHP89179, SEQ ID NO: 20) along with the SSI components (Donor DNA (PHP0004, SEQ ID NO: 17)+UBI1ZM PRO::FLPm::PINII TERM (PHP5096, SEQ ID NO: 18)) produces site-specific integration of the donor fragment into the Chrom-1 target site at rates of 4-7% relative to the number of bombarded immature embryos.

### Example 3: Rapid Recovery of Streptomycin Resistant Corn Plants

### A. Determining an Effective Spectinomycin and Streptomycin Concentration for Inhibition of Somatic Embryo Germination and Growth of Non-Transgenic Maize Plants.

[0240] To determine the effective amount of streptomycin to use in selection of transgenic maize plants Pioneer inbreds PHR03, GR84Z, and ED85E were subjected to experimental conditions that included mock infection with a disarmed strain of Agrobacterium, followed by culturing in media supplemented with different concentrations of spectinomycin and streptomycin. Two to three ears for each genotype were transformed and embryos evenly split between nine treatments. For transformation control embryos were transformed and then cultured on media without selection. For detecting the direct effect of the selective agent on an embryo, ten to fifteen embryos per ear were not transformed and were cultured on similar media as other treatments which served as the positive control in the experiments. We tested four different concentrations of two different selective agents namely, spectinomycin and streptomycin, at concentrations of 25, 50, 100 and 150 mg/L to establish a kill curve for each antibiotic.

[0241] For PHR03 transformation, the same media was used for all treatments with various concentrations of selective agent, namely, cocultured for two to four days at 21° C. on 710I medium, moved to 13152C medium for resting for seven to ten days at 28° C. in dark, moved to 13152C medium containing a respective concentration of selective agent for three weeks at 28° C. in dim light, moved to 13329B medium (MS salts and vitamins (T Murashige and F Skoog (1962) Physiol Plant 15:473-497), 0.1 g/l myo-inositol, 0.5 mg/l zeatin, 1.25 mg/l cupric sulfate, 0.7 g/l proline, 600 g/l sucrose, 1 gm/l IAA, 0.1 μm ABA, 10 mg/l meropenem, 1 mg/l BAP, and 8 g/l Sigma agar, pH 5.6) containing the respective selective agent for maturation for two to three weeks at 28° C. in dim light. Then shoots were transferred to light for two to three days and the shoot color was monitored and photographed for visual phenotyping (data not shown).

[0242] For ED85E and GR84Z transformations, the same media was used for all treatments with various concentrations of selective agent, namely, cocultured for one day at 21° C. on 562V medium, moved to 605B medium for resting for eleven to fourteen days at 28° C. in the dark, moved to 605B medium containing the respective concentration of selective agent for three weeks at 28° C. in dim light, moved to 13329B medium containing the respective selective agent for maturation for teo to three weeks at 28° C. in dim light. Then shoots were transferred to light for two to three days and the shoot color was monitored and photographed for visual phenotyping (data not shown).

[0243] No apparent differences in the callus morphology was observed in the selection media with antibiotics compared to the transformation control material and non-transformed controls (data not shown).

[0244] Further kill curve experiments with Pioneer inbred PHR03 were conducted to detect the effect of spectinomycin and streptomycin on maize transformation at the maturation stage. Maturation media supplemented with spectinomycin grew normally and produced shoots like on the media without spectinomycin. However, maturation media supplemented with streptomycin (25 mg/L) resulted in production of events containing a mixture of green and bleached phenotypes, suggesting the potency of the antibiotic as a selectable agent for maize transformation. With higher concentrations of streptomycin (50 mg/L and above), most of the shoots produced were bleached and higher concentrations of streptomycin (100-150 mg/L) adversely affected shoot formation and regeneration (data not shown). Two additional Pioneer corn inbreds, ED85E and GR84Z were also subjected to streptomycin selection at maturation stage, resulting in bleached shoots at 25 mg/L and shoot development was affected at 100-125 mg/L. For inbreds PHR03, ED85E and GR84Z streptomycin was a better selection agent for maize transformation than spectinomycin.

B. Co-Bombardment of SPCN Expression Cassette Along with PLTP::ODP2 and Axig1::WUS Cassettes Resulted in Rapid Selection of Streptomycin-Resistant Maize T0 Plantlets.

[0245] To evaluate the effect of the maize optimized SPCN gene on immature embryo transformation, we carried out co-bomambered experiments in maize inbred PHR03. Immature embryos were harvested from Pioneer inbred PHR03 ten to twelve days after pollination. The immature embryos were placed on high-osmotic medium to induce plasmolysis. Meanwhile, three plasmids PHP91619 (containing PRO::UBI1ZM 5′ UTR::UBI1ZM INTRON1:FRT1:CTP::SPCN::SB-UBI TERM, SEQ ID NO: 3), PHP75799 (containing ZM-PLTP PRO::ZM-PLTP 5′ UTR::ZM-ODP2::OS-T28 TERM, SEQ ID NO: 4), and PHP76976 (containing ZM-AXIG1 PRO::ZM-WUS2::IN1-2 TERM, SEQ ID NO: 5) were individually precipitated onto 0.6 μM gold particles and introduced into the scutellar cells of the immature embryos. As a control, just PHP75799 (SEQ ID NO: 4) and PHP76976 (SEQ ID NO: 5) were used, with no SPCN-containing plasmid. After particle bombardment and culturing the zygotic immature embryos on the media series described in A above, with either 50 mg/l or 100 mg/l streptomycin, no streptomycin-resistant, green plantlets were recovered in the control treatments (PHP75799 (SEQ ID NO: 4) and PHP76976 (SEQ ID NO: 5)). However, in the treatment in which all three plasmids were introduced (PHP91619 (SEQ ID NO: 3), PHP75799 (SEQ ID NO: 4), and PHP76976 (SEQ ID NO: 5)), streptomycin-resistant, green T0 plantlets were produced at a frequency of between 10-30% relative to the number of bombarded immature embryos.

[0246] The regenerated plants with green shoots and bleached shoots were collected for molecular analysis by qPCR. Any plant that was positive for the SPCN gene was considered a transgenic event. The molecular data is presented in Table 4. We identified five (5) SPCN transgenic events from the total of fourteen (14) green looking plants, while four (4) out of the six (6) bleached plants were also positive for SPCN marker gene. The maize-codon-optimized SPCN gene (SEQ ID NO: 11) was efficacious for conferring resistance to streptomycin in maize.

TABLE 4
Molecular event data of the transgenic maize plants transformed
with the SPCN gene by particle bombardment.

| | SB | ODP-T28 | ZM-WUS2 |
|---|---|---|---|
| Plant | UBI_TERM PCR | TERM | IN2 TERM |
| Phenotype | (SPCN) (+/−) | Copy # | Copy # |
| Green | − | 0 | 0 |
| Bleached | − | 0 | 0 |
| Green | + | 2 | 2 |
| Green | − | 0 | 0 |
| Green | + | 2 | 1 |
| Green | − | 0 | 0 |
| Green | − | 0 | 0 |
| Green | − | 0 | 0 |
| Green | − | 0 | 0 |
| Green | + | 1 | 1 |
| Green | − | 0 | 0 |
| Bleached | + | 1 | 1 |
| Bleached | + | 3 | 1 |
| Green | − | 0 | 0 |
| Bleached | + | 0 | 0 |
| Green | + | 0 | 0 |
| Green | + | 0 | 0 |
| Bleached | + | 0 | 0 |
| Green | − | 0 | 0 |
| Bleached | − | 0 | 0 |

C. Agrobacterium Transformation of SPCN Expression Cassette Along with PLTP::WUS Cassettes Resulted in Efficacious Rapid Selection of Streptomycin-Resistant Maize T0 Plantlets.

[0247] Immature embryos of Pioneer inbred PHR03 were isolated from immature ears (ten to twelve days after pollination) and were transformed with an Agrobacterium strain carrying the SPCN gene. Specifically, the immature embryos were transformed with Agrobacterium strain LBA4404 THY- (disclosed in U.S. Pat. No. 8,334,429 and incorporated herein in by reference its entirety) containing PHP71539 (SEQ ID NO: 1) (disclosed in U.S. Patent Appln. No. US20190078106 and incorporated herein by reference in its entirety). A binary plasmid PHP92307 (SEQ ID NO: 32) containing the T-DNA expression cassette RB+LOXP+PLTP:WUS:IN2-1 TERM+ZMHSP17.7:MO-CRE:PINII TERM+UBI1ZMPRO:NPTII:SB-UBI TERM+UBI1ZM PRO-FRT1 FRT1:CTP::SPCN::SB-UBI TERM+LB) was used to evaluate the selection of NPTII transgenic plants on a medium supplemented with G418 (control) and the selection of SPCN transgenic plants on a medium supplemented with Streptomycin. Two different concentrations of streptomycin (50 and 100 mg/1) were tested for selecting plants that are resistant to a streptomycin selective agent. After infection with Agrobacterium the immature embryos were co-cultured for two to four days at 21° C. on 710I medium, then were transferred to13152C medium (resting medium with no selection) for seven to ten days at 28° C. in the dark, then moved onto 13152C medium (with and without the respective concentrations of streptomycin) for three weeks at 28° C. in dim light, and were then transferred to 13329B medium (with and without the respective concentrations of streptomycin) for somatic embryo maturation for two to three weeks at 28° C. in dim light. Then the shoots were transferred to the light for two to three days and their vigor and leaf color was evaluated (data not shown).

[0248] Plantlets on 50 mg/L streptomycin displayed a mixture of green and bleached (white) leaves, on 100 mg/L all of the shoots were bleached. The green and pale green shoots were regenerated in <50 days. These shoots were subjected to molecular data analysis by qPCR. Eighty-one plants were regenerated and twenty-nine of those plants were identified as transgenic, a 35% transgenic plant recovery. The molecular data of the transgenic plants are presented in Table 5. This data showed streptomycin concentrations between about 50 mg/L and about 100 mg/L were efficacious for selection of transgenic plants expressing the maize-optimized SPCN gene.

TABLE 5
PHR03 molecular event data of maize plants transformed with an
Agrobacterium containing the binary vector carrying the SPCN gene

| | SB UBI_TERM | | | |
|---|---|---|---|---|
| Plant | PCR (SPCN) | ZM-WUS2 IN2 | MO CRE PCR | BACKBONE PCR |
| phenotype | Copy # | TERM Copy # | (+/−) | (+/−) |
| Green | 2 | 1 | + | + |
| Green | 1 | 0 | − | − |
| Green | 1 | 1 | + | − |
| Green | 1 | 0 | − | − |
| Green | 1 | UNDETERMINED | + | − |
| Green | 1 | 1 | + | − |
| Green | 1 | UNDETERMINED | + | − |
| Green | 1 | 0 | − | − |
| Green | 2 | 0 | − | − |
| Green | 1 | 1 | + | − |
| Green | 3 | 2 | + | + |
| Green | 1 | 0 | UNDETERMINED | − |
| Green | 1 | 0 | − | − |
| Green | 1 | 0 | − | − |
| Green | 1 | UNDETERMINED | UNDETERMINED | − |

D. SPCN Expression Cassette Along with PLTP::ODP2 and Axig1::WUS Cassettes are Efficacious for the Rapid Selection of Streptomycin-Resistant Maize T0 Plantlets.

[0249] Immature embryos are harvested from Pioneer inbred PHR03 10-12 days after pollination. The immature embryos are placed on high-osmotic medium to induce plasmolysis. Meanwhile, three plasmids PHP91619 (containing PRO::UBI1ZM 5′ UTR::UBI1ZM INTRON1:FRT1:CTP::SPCN::SB-UBI TERM, SEQ ID NO: 3), PHP75799 (containing ZM-PLTP PRO::ZM-PLTP 5′ UTR::ZM-ODP2::OS-T28 TERM, SEQ ID NO: 4), and PHP76976 (containing ZM-AXIG1 PRO::ZM-WUS2::IN1-2 TERM, SEQ ID NO: 5) are individually precipitated onto 0.6 μM gold particles and introduced into the scutellar cells of the immature embryos. As a control, just PHP75799 (SEQ ID NO: 4) and PHP76976 (SEQ ID NO: 5) are used, with no SPCN-containing plasmid. After particle bombardment and culturing the zygotic immature embryos on the media series described in A above, with either 50 mg/l or 100 mg/l streptomycin, no streptomycin-resistant, green plantlets are recovered in the control treatments (PHP75799 (SEQ ID NO: 4) and PHP76976 (SEQ ID NO: 5)). However, in the treatment in which all three plasmids are introduced (PHP91619 (SEQ ID NO: 3), PHP75799 (SEQ ID NO: 4), and PHP76976 (SEQ ID NO: 5)), streptomycin-resistant, green T0 plantlets are produced at a frequency of between 10-30% relative to the number of bombarded immature embryos.

[0250] The maize-codon-optimized SPCN gene (SEQ ID NO: 11) is efficacious for conferring resistance to streptomycin in maize.

### Example 4: Rapid Recovery of Streptomycin Resistant Sorghum Plants

### A. Determining an Effective Streptomycin Concentration for Inhibition of Somatic Embryo Germination and Growth of Non-Transgenic Sorghum Plants.

[0251] TX430, a non-tannin sorghum variety, was used in this study. Greenhouse temperatures averaged 29° C. during the day and 20° C. at night with a 12 h day/night photoperiod and supplemental lighting is provided by a 3:1 ratio of metal halide (1,000 W) and high-pressure sodium (1,000 W) lamps. The components of the media used in this study are listed in Table 14. The baseline transformation protocol is described in detail as “treatment C” in Zhao et al. (Plant Mol. Biol. (2000) 44:789-798). Briefly, freshly harvested sorghum immature grains were sterilized with 50% bleach and 0.1% Tween-20 for 30 minutes under vacuum and then rinsed with sterile water three times. The embryos were subjected to the following five sequential steps: (1) Agrobacterium infection: embryos were incubated in an Agrobacterium suspension (OD=1.0 at 550 nm) with PHI-I medium for five minutes; (2) co-cultivation: embryos were cultured on PHI-T medium following infection for three days at 25° C. in the dark; (3) resting: embryos were cultured on PHI-T medium plus 100 mg/L carbenicillin for seven days at 28° C. in the dark; (4) selection: embryos were cultured on PHI-U medium (in which either 25, 50, 100 or 150 mg/L streptomycin replaces PPT as the selective agent in Table 14) for two weeks, followed by culture on PHI-V medium (in which either 25, 50, 100 or 150 mg/L streptomycin replaces PPT as the selective agent in Table 14) for the remainder of the selection process at 28° C. in the dark, using subculture intervals of two to three weeks; (5) regeneration: callus was cultured on PHI-X medium (in which either 25, 50, 100 or 150 mg/L streptomycin replaces PPT as the selective agent in Table 14) for two to three weeks in the dark to stimulate shoot development, followed by culture for one week under conditions of 16 hours light (40-120 μE/m²/s) and 8 hours dark at 25° C., and a final subculture on PHI-Z medium for two to three weeks under lights (16 h, 40-120 μE/m²/s) to stimulate root growth. Regenerated plantlets were transplanted into soil and grown in the greenhouse (Zhao et al. 2000). T0 plants were self-pollinated to produce T1 progeny for further analysis.

[0252] After transformation with Agrobacterium strain LBA4404 THY-containing PHP71539 (SEQ ID NO: 1) and PHP92307 (SEQ ID NO: 32) containing the T-DNA expression cassette RB+LOXP+PLTP:WUS:IN2-1 TERM+ZMHSP17.7:MO-CRE:PINII TERM+UBI1ZMPRO:NPTII:SB-UBI TERM+UBI1ZM PRO-FRT1 FRT1:CTP::SPCN::SB-UBI TERM), the immature embryos were cultured as described above.

[0253] Plantlets on 25 mg/L streptomycin displayed a mixture of green and bleached (white) leaves, on 50 mg/L all of the shoots were bleached. On 100 mg/L shoots were small and weak and all were bleached. No shoots germinated on 150 mg/L streptomycin. Based on this data, either 50 or 100 mg/L streptomycin was used for selection while expressing the maize-optimized SPCN gene in sorghum.

B. SPCN Expression Cassette Along with PLTP::ODP2 and Axig1::WUS Cassettes are Efficacious for the Rapid Selection of Streptomycin-Resistant Sorghum T0 Plantlets.

[0254] Immature embryos are harvested from sorghum variety TX430. The immature embryos are placed on high-osmotic medium to induce plasmolysis. Meanwhile, three plasmids PHP91619 (containing PRO::UBI1ZM 5′ UTR::UBI1ZM INTRON1:FRT1:CTP::SPCN::SB-UBI TERM, SEQ ID NO: 3), PHP75799 (containing ZM-PLTP PRO::ZM-PLTP 5′ UTR::ZM-ODP2::OS-T28 TERM, SEQ ID NO: 4), and PHP76976 (containing ZM-AXIG1 PRO::ZM-WUS2::IN1-2 TERM, SEQ ID NO: 5) are individually precipitated onto 0.6 μM gold particles and introduced into the scutellar cells of the immature embryos. As a control, just PHP75799 (SEQ ID NO: 4) and PHP76976 (SEQ ID NO: 5) are used, with no SPCN-containing plasmid. After particle bombardment and culturing the zygotic immature embryos on the media series described in A above, with either 50 mg/L or 100 mg/L streptomycin, no streptomycin-resistant, green plantlets are recovered in the control treatments (PHP75799 (SEQ ID NO: 4) and PHP76976 (SEQ ID NO: 5)). However, in the treatment in which all three plasmids are introduced (PHP91619 (SEQ ID NO: 3), PHP75799 (SEQ ID NO: 4), and PHP76976 (SEQ ID NO: 5)), streptomycin-resistant, green T0 plantlets are produced at a frequency of between 10-30% relative to the number of bombarded immature embryos.

[0255] The maize-codon-optimized SPCN gene (SEQ ID NO: 11) is efficacious for conferring resistance to streptomycin in sorghum.

### Example 5: Rapid Recovery of Streptomycin Resistant Wheat Plants

### A. Determining an Effective Streptomycin Concentration for Inhibition of Somatic Embryo Germination and Growth of Non-Transgenic Wheat Plants.

[0256] An aliquot of Agrobacterium strain LBA4404 containing the vector of interest is removed from storage at −80° C. and streaked onto solid LB medium containing a selective agent (kanamycin or spectinomycin, depending on which plasmids the bacterial strain contains). The Agrobacterium is cultured on the LB plate at 21° C. in the dark for two to three days, at which time a single colony is selected from the plate, streaked onto an 810D medium (5 g/l yeast extract, 10 g/l peptone, 5 g/l NaCl, adjust pH TO 6.8 with NaOH, 15 g/l bacto-agar, autoclave and cool to 60° C., then add the appropriate selective agent) and is then incubated at 28° C. in the dark overnight. The Agrobacterium culture is transferred from the plate using a sterile spatula and suspended in ˜5 mL wheat infection medium (WI 4) with 400 μM acetosyringone (AS). The optical density (600 nm) of the suspension is adjusted to about 0.1 to 0.7 using the same medium.

[0257] Four to five spikes containing immature seeds (with 1.4-2.3 mm embryos) are collected, and the immature embryos are isolated from the immature seeds. The wheat grains are surface sterilized for fifteen minutes in 20% (v/v) bleach (5.25% sodium hypochlorite) plus 1 drop of Tween 20, followed with two to three washes in sterile water. After transformation with Agrobacterium strain LBA4404 THY-containing PHP71539 (SEQ ID NO: 1) and PHP92307 (SEQ ID NO: 32) containing the T-DNA expression cassette RB+LOXP+PLTP:WUS:IN2-1 TERM+ZMHSP17.7:MO-CRE:PINII TERM+UBI1ZMPRO:NPTII:SB-UBI TERM+UBI1ZM PRO-FRT1 FRT1:CTP::SPCN::SB-UBI TERM), the immature embryos are co-cultured for one day at 21° C. on 562V medium, then transferred to 605B medium for eleven to fourteen days at 28° C. in the dark, transferred to 605B medium containing no streptomycin (control) or either 25, 50, 100 or 150 mg/L streptomycin for three weeks at 28° C. in the dark, and then transferred to 13329B medium (with or without the various concentrations of streptomycin described above) for somatic embryo maturation for two to three weeks at 28° C. in the dark. At this point, the shoots are transferred to light for two to three days and their vigor and leaf color is evaluated (data not shown).

[0258] Plantlets on 25 mg/L streptomycin display a mixture of green and bleached (white) leaves, on 50 mg/L all of the shoots are bleached. On media containing 100 mg/L streptomycin, the shoots are small and weak and all are bleached. No shoots germinate on 150 mg/L streptomycin. Based on this data, either 50 or 100 mg/L streptomycin is used for selection while expressing the maize-optimized SPCN gene in wheat.

B. SPCN Expression Cassette Along with PLTP::ODP2 and Axig1::WUS Cassettes are Efficacious for the Rapid Selection of Streptomycin-Resistant Wheat T0 Plantlets.

[0259] Immature embryos are harvested from Pioneer Spring wheat variety SPC0456D. The immature embryos are placed on high-osmotic medium to induce plasmolysis. Meanwhile, three plasmids PHP91619 (containing PRO::UBI1ZM 5′ UTR::UBI1ZM INTRON1:FRT1:CTP::SPCN::SB-UBI TERM, SEQ ID NO: 3), PHP75799 (containing ZM-PLTP PRO::ZM-PLTP 5′ UTR::ZM-ODP2::OS-T28 TERM expression cassette, SEQ ID NO: 4), and PHP76976 (containing ZM-AXIG1 PRO::ZM-WUS2::IN1-2 TERM expression cassette, SEQ ID NO: 5) are individually precipitated onto 0.6 μM gold particles and introduced into the scutellar cells of the immature embryos. As a control, just PHP75799 (SEQ ID NO: 4) and PHP76976 (SEQ ID NO: 5) are used, with no SPCN-containing plasmid. After particle bombardment and culturing the zygotic immature embryos on the media series described in A above, with either 50 mg/L or 100 mg/L streptomycin, no streptomycin-resistant, green plantlets are recovered in the control treatments (PHP75799 (SEQ ID NO: 4) and PHP76976 (SEQ ID NO: 5)). However, in the treatment in which all three plasmids are introduced (PHP91619 (SEQ ID NO: 3), PHP75799 (SEQ ID NO: 4), and PHP76976 (SEQ ID NO: 5)), streptomycin-resistant, green T0 plantlets are produced at a frequency of between 10-30% relative to the number of bombarded immature embryos.

[0260] The maize-codon-optimized SPCN gene (SEQ ID NO: 11) is efficacious for conferring resistance to streptomycin in wheat.

### Example 6: Rapid Recovery of Streptomycin Resistant Rice Plants

### A. Determining an Effective Streptomycin Concentration for Inhibition of Somatic Embryo Germination and Growth of Non-Transgenic Rice Plants.

[0261] To determine the effective amount of streptomycin to use in selection of transgenic rice plants Oryza sativa (v. indica IRV95) is subjected to experimental conditions that included Agrobacterium transformation but with a non-functional dicot cassette containing the SPCN gene. Immature embryos are isolated ten to twelve days after pollination. The immature embryos are split evenly between five treatments; a control treatment in which the embryos were cultured on 605J medium with no selection or 605J medium with either 25, 50, 100 or 150 mg/L streptomycin. After transformation with Agrobacterium strain LBA4404 THY- (disclosed in U.S. Pat. No. 8,334,429 and incorporated herein by reference in its entirety) containing PHP71539 (SEQ ID NO: 1) (disclosed in U.S. Patent Appln. No. US20190078106 and incorporated herein by reference in its entirety) and PHP92307 (SEQ ID NO: 32) containing the T-DNA expression cassette RB+LOXP+PLTP:WUS:IN2-1 TERM+ZMHSP17.7:MO-CRE:PINII TERM+UBI1ZMPRO:NPTII:SB-UBI TERM+UBI1ZM PRO-FRT1 FRT1:CTP::SPCN::SB-UBI TERM), the immature embryos are co-cultured for one day at 21° C. on 562V medium, moved to 605J medium for eleven to fourteen days at 28° C. in the dark (resting no selection), then transferred to 605J control medium or 605J medium containing the respective concentrations of streptomycin described above for three weeks at 28° C. in the dark, followed by transfer to 289Q medium (289Q control medium or 289Q medium with the various concentrations of streptomycin described above) for somatic embryo maturation for two to three weeks at 28° C. in the dark. Then the shoots are transferred to light for two to three days and their vigor and leaf color is evaluated (data not shown).

[0262] Rice plantlets on 25 mg/L streptomycin display a mixture of green and bleached (white) leaves, on 50 mg/L all of the shoots are bleached. On media containing 100 mg/L streptomycin the shoots are small and weak and all are bleached. No shoots germinate on 150 mg/L streptomycin. This data shows that streptomycin concentrations between 50 or 100 mg/L is used for selection of transgenic rice plants expressing the maize-optimized SPCN gene.

B. SPCN Expression Cassette Along with PLTP::ODP2 and Axig1::WUS Cassettes are Efficacious for the Rapid Selection of Streptomycin-Resistant Rice T0 Plantlets.

[0263] Immature embryos are harvested for rice indica variety IRV95 eleven to twelve days after pollination. The immature embryos are placed on high-osmotic medium to induce plasmolysis. Meanwhile, three plasmids PHP91619 (containing PRO::UBI1ZM 5′ UTR::UBI1ZM INTRON1:FRT1:CTP::SPCN::SB-UBI TERM, SEQ ID NO: 3), PHP75799 (containing ZM-PLTP PRO::ZM-PLTP 5′ UTR::ZM-ODP2::OS-T28 TERM, SEQ ID NO: 4), and PHP76976 (containing ZM-AXIG1 PRO::ZM-WUS2::IN1-2 TERM, SEQ ID NO: 5) are individually precipitated onto 0.6 μM gold particles and introduced into the scutellar cells of the immature embryos. As a control, just PHP75799 (SEQ ID NO: 4) and PHP76976 (SEQ ID NO: 5) are used, with no SPCN-containing plasmid. After particle bombardment and culturing the zygotic immature embryos on the media series described in A above, with either 50 mg/L or 100 mg/L1 streptomycin, no streptomycin-resistant, green plantlets are recovered in the control treatments (PHP75799 (SEQ ID NO: 4) and PHP76976 (SEQ ID NO: 5)). However, in the treatment in which all three plasmids are introduced (PHP91619 (SEQ ID NO: 3), PHP75799 (SEQ ID NO: 4), and PHP76976 (SEQ ID NO: 5)), streptomycin-resistant, green T0 plantlets are readily produced at a frequency between 10-30% relative to the number of bombarded immature embryos.

[0264] The maize-codon-optimized SPCN gene (SEQ ID NO: 11) is efficacious for conferring resistance to streptomycin in rice.

### Example 7: Rapid Recovery of Streptomycin Resistant Setaria Plants

### A. Determining an Effective Streptomycin Concentration for Inhibition of Somatic Embryo Germination and Growth of Non-Transgenic Setaria Plants.

[0265] Seed from Setaria viridis are surface sterilized in half-strength Clorox for fifteen minutes, are washed three times in sterile, distilled water, are blotted dry using sterile filter papers and then are placed on half-strength MS medium for germination. After fourteen days of growth, the leaves of the sterile Setaria seedlings are diced using a sterile #11 scalpel blade and the leaf segments aliquoted evenly between five treatments; a control treatment in which the embryos are cultured on 605J medium with no selection, or the same medium with either 25, 50, 100 or 150 mg/L streptomycin. After transformation with Agrobacterium strain LBA4404 THY-containing PHP71539 (SEQ ID NO: 1) and PHP1 (SEQ ID NO.: 33) containing the T-DNA expression cassette RB+LoxP-NOS:WUS:PINII+ZMUBI:ODP2:PINIFRAB17:MOCRE:PINII+ZMUBI-CTP-SPCN:SB-UBITERM+LB; the leaf segments are co-cultured for one day at 21° C. on 562V medium, and then undergo a series of transfers; first to 605B medium for eleven to fourteen days at 28° C. in the dark, next onto 605B medium containing the respective concentrations of streptomycin for three weeks at 28° C. in the dark, and then onto 13329B medium (with the various concentrations of streptomycin described above) for somatic embryo maturation for another two to three weeks at 28° C. in the dark. Then the shoots are transferred to light for two to three days and their vigor and leaf color is evaluated (data not shown).

[0266] Plantlets on media containing 25 mg/L streptomycin display a mixture of green and bleached (white) leaves, on media containing 50 mg/L all of the shoots are bleached. On media containing 100 mg/L shoots are small and weak and all are bleached. No shoots germinate on media containing 150 mg/L streptomycin. Based on this data, either 50 or 100 mg/L streptomycin is used for selection while expressing the maize-optimized SPCN gene in Setaria.

B. SPCN Expression Cassette Along with UBI:ODP2 and NOS:WUS Cassettes are Efficacious for the Rapid Selection of Streptomycin-Resistant Setaria T0 Plantlets.

[0267] Setaria seed are sterilized, germinated to produce fourteen-day old plantlets, and the leaf tissue is diced into 2-3 mm segments as described above. The leaf segments are then transformed using Agrobacterium strain LBA4404 THY-containing PHP71539 (SEQ ID NO: 1) (the VIR-containing helper plasmid) and a co-habitating plasmid PHP1 (SEQ ID NO: 33) with the following T-DNA; RB+LoxP-NOS:WUS:PINII+ZMUBI: ODP2:PINIFRAB 17:MOCRE:PINII+ZMUBI-CTP-SPCN: SB-UBITERM+LB (treatment with SPCN expression cassette). As a control treatment, leaf segments are transformed with Agrobacterium strain LBA4404 THY-containing PHP71539 (SEQ ID NO: 1) (the VIR-containing helper plasmid) and a co-habitating plasmid PHP2 (SEQ ID NO: 34) with the following T-DNA; RB+LoxP-NOS:WUS:PINII+ZMUBI:ODP2:PINIFRAB17:MOCRE:PINII+LB (control treatment with no SPCN expression cassette). After Agrobacterium-mediated transformation and culturing the leaf segments on the media series described in Section A above, with each medium after the resting medium containing either 50 mg/L or 100 mg/L streptomycin, no streptomycin-resistant, green plantlets are recovered in the control treatment. However, in the treatment containing the SPCN expression cassette streptomycin-resistant, green T0 plantlets are produced at a frequency of between 10-30% relative to the number of seedlings infected with Agrobacterium.

### Example 8: Rapid Recovery of Streptomycin Resistant Teff Plants

### A. Determining an Effective Streptomycin Concentration for Inhibition of Somatic Embryo Germination and Growth of Non-Transgenic Teff Plants.

[0268] Seeds from Eragrostis tef are surface sterilized in half-strength Clorox for fifteen minutes, are rinsed three times in sterile, distilled water, are blotted dry using sterile filter papers and then are placed on half-strength MS medium for germination. After fourteen days of growth, the leaves of the sterile teff seedlings are diced using a sterile #11 scalpel blade and the leaf segments are aliquoted evenly between five treatments; a control treatment in which the embryos are cultured on 605J medium with no selection, or the same 605J medium with either 25, 50, 100 or 150 mg/L streptomycin. After transformation with Agrobacterium strain LBA4404 THY-containing PHP71539 (SEQ ID NO: 1) and PHP1 (SEQ ID NO: 33) containing the T-DNA expression cassette RB+LoxP-NOS:WUS:PINII+ZMUBI: ODP2:PINIFRAB 17:MOCRE:PINII+ZMUBI-CTP-SPCN: SB-UBITERM+LB, the leaf segments are co-cultured for one day at 21° C. on 562V medium, and then undergo a series of additional transfers; onto 605B medium for eleven to fourteen days at 28° C. in the dark, next onto 605B medium with no selection or 605B medium with either 25, 50, 100 or 150 mg/L streptomycin for three weeks at 28° C. in the dark, and then onto 13329B medium (with and without the various concentrations of streptomycin described above) for somatic embryo maturation for two to three weeks at 28° C. in the dark. At this point, the shoots are transferred to light for two to three days and their vigor and leaf color is evaluated (data not shown).

[0269] Plantlets on 25 mg/L streptomycin display a mixture of green and bleached (white) leaves, on 50 mg/L all of the shoots are bleached. On 100 mg/L, all the shoots are small and weak and all are bleached. No shoots germinate on 150 mg/L streptomycin. Based on this data, either 50 mg/L1 or 100 mg/L streptomycin is used for selection while expressing the maize-optimized SPCN gene in teff.

B. SPCN Expression Cassette Along with UBI:ODP2 and NOS:WUS Cassettes are Efficacious for the Rapid Selection of Streptomycin-Resistant Eragrostis tef T0 Plantlets.

[0270] Teff seeds are sterilized, germinated to produce fourteen-day old plantlets, and the leaf tissue is diced into 2-3 mm segments as described above. The leaf segments are then transformed using Agrobacterium strain LBA4404 THY-containing PHP71539 (SEQ ID NO: 1) (the VIR-containing helper plasmid) and a co-habitating plasmid PHP1 (SEQ ID NO: 33) with the following T-DNA; RB+LoxP-NOS:WUS:PINII+ZMUBI: ODP2:PINIFRAB 17:MOCRE:PINII+ZMUBI-CTP-SPCN: SB-UBITERM+LB (treatment with SPCN expression cassette). As a control treatment, leaf segments are transformed with Agrobacterium strain LBA4404 THY-containing PHP71539 (SEQ ID NO: 1) (the VIR-containing helper plasmid) and a co-habitating plasmid PHP2 (SEQ ID NO: 34) with the following T-DNA; RB+LoxP-NOS:WUS:PINII+ZMUBI:ODP2:PINIFRAB17:MOCRE:PINII+LB (control treatment with no SPCN expression cassette). After Agrobacterium-mediated transformation and culturing the leaf segments on the media series described in Section A above, with each medium after the resting medium containing either 50 mg/L or 100 mg/L streptomycin, no streptomycin-resistant, green plantlets are recovered in the control treatment. However, in the treatment containing the SPCN expression cassette streptomycin-resistant, green T0 plantlets are produced at a frequency of between 10-30% relative to the number of seedlings infected with Agrobacterium.

### Example 9: Rapid Recovery of Streptomycin Resistant Sugarcane Plants

### A. Determining an Effective Streptomycin Concentration for Inhibition of Somatic Embryo Germination and Growth of Non-Transgenic Sugarcane Plants

[0271] Sterile plantlets of sugarcane are obtained in vitro through meristem proliferation, and are maintained in multiple shoot culture to produce starting leaf explants for transformation. Leaves from the sterile plantlets are diced using a sterile #11 scalpel blade and the leaf segments aliquoted evenly between five treatments: a control treatment in which the embryos are cultured on 605J medium with no selection, or the same medium with either 25, 50, 100 or 150 mg/L streptomycin. After transformation with Agrobacterium strain LBA4404 THY-containing PHP71539 (SEQ ID NO: 1) and PHP1 (SEQ ID NO: 33) containing the T-DNA expression cassette RB+LoxP-NOS:WUS:PINII+ZMUBI:ODP2:PINIFRAB17:MOCRE:PINII+ZMUBI-CTP-SPCN:SB-UBITERM+LBthe leaf segments are co-cultured for one day at 21° C. on 562V medium, moved to 605B medium for eleven to fourteen days at 28° C. in the dark (resting no selection), then transferred to 605B control medium or 605B medium containing the respective concentrations of streptomycin described above for three weeks at 28° C. in the dark, transferred to 13329B medium (with and without the various concentrations of streptomycin) for somatic embryo maturation for two to three weeks at 28° C. in the dark. Then the shoots are transferred to light for two to three days and their vigor and leaf color is evaluated (data not shown).

[0272] Plantlets on 25 mg/L streptomycin display a mixture of green and bleached (white) leaves, on 50 mg/L all of the shoots are bleached. On 100 mg/L, the shoots are small and weak and all are bleached. No shoots germinated on 150 mg/L streptomycin. Based on this data, either 50 mg/L or 100 mg/L streptomycin is used for selection while expressing the maize-optimized SPCN gene in sugarcane.

B. SPCN Expression Cassette Along with UBI:ODP2 and NOS:WUS Cassettes are Efficacious for the Rapid Selection of Streptomycin-Resistant Sugarcane T0 Plantlets

[0273] Sterile plantlets of sugarcane are obtained in vitro through meristem proliferation, and are maintained in multiple shoot culture to produce starting leaf explants for transformation. Leaves from the sterile plantlets are diced using a sterile #11 scalpel blade and the leaf segments are then transformed with Agrobacterium strain LBA4404 THY-containing PHP71539 (SEQ ID NO: 1) (the VIR-containing helper plasmid) and a co-habitating plasmid PHP1 (SEQ ID NO: 33) with the following T-DNA; RB+LoxP-NOS:WUS:PINII+ZMUBI: ODP2:PINIFRAB 17:MOCRE:PINII+ZMUBI-CTP-SPCN: SB-UBITERM+LB (treatment with SPCN expression cassette). As a control treatment, leaf segments are transformed with Agrobacterium strain LBA4404 THY-containing PHP71539 (SEQ ID NO: 1) (the VIR-containing helper plasmid) and a co-habitating plasmid PHP2 (SEQ ID NO: 34) with the following T-DNA; RB+LoxP-NOS:WUS:PINII+ZMUBI:ODP2:PINIFRAB17:MOCRE:PINII+LB (control treatment with no SPCN expression cassette). After Agrobacterium-mediated transformation and culturing the leaf segments on the media series described in Section A above, with each medium after the resting medium containing either 50 mg/L or 100 mg/L streptomycin, no streptomycin-resistant, green plantlets are recovered in the control treatment. However, in the treatment containing the SPCN expression cassette streptomycin-resistant, green T0 plantlets are produced at a frequency of between 10-30% relative to the number of seedlings infected with Agrobacterium.

### Example 10: Rapid Recovery of Streptomycin Resistant Plants

[0274] Similar experiments to those described above produce similar results in pearl millet, barley, oats, and flax. In addition, in species that are readily transformable without the use of morphogenic genes the SPCN expression cassette is used alone to recover transgenic events.

### Example 11: Improved Recovery of Site-Specific Recombination Events Using Streptomycin Selection in Maize

[0275] Immature ears are harvested from PH184C and 2.0 mm immature embryos are extracted from the kernels on the day of the particle bombardment treatment. The embryos are placed on high osmotic medium (13224B medium) for three hours prior to particle bombardment. Immature embryos are bombarded with an equimolar ratio of four plasmids containing the following expression cassettes: 1) FRT1:CTP::SPCN::PINII TERM:FRT87 (PHP3, SEQ ID NO: 35); 2) UBI1ZM PRO::FLPm::PINII TERM (PHP5096, SEQ ID NO: 18); 3) ZM-PLTP PRO::ZM-PLTP 5′ UTR::ZM-ODP2::OS-T28 TERM (PHP75799, SEQ ID NO: 4); and 4) ZM-AXIG1 PRO::ZM-WUS2::IN2-1 TERM (PHP76976, SEQ ID NO: 5). After particle bombardment, the immature embryos remain on the high-osmotic medium overnight, and are then transferred to resting medium (13266K) for eight days. After the resting period, the embryos are transferred to maturation medium (2890 medium with 100 mg/L streptomycin) for twenty-one days, and then moved onto rooting medium (272X medium with 50 mg/L streptomycin) for fourteen to seventeen days (until the roots are large enough for transplanting into soil). At the plantlet stage, leaf tissue is sampled for PCR analysis to confirm that the genes within the flanking FRT1 and FRT87 sites of the original target locus are no longer present, that the new genes within the donor cassette have recombined into the target locus correctly, and precise RMCE (Recombinase-Mediated Cassette Exchange) events are identified. This reduces the entire site-specific integration (SSI) cycle, from transformation to having precise RMCE-derived plants in the greenhouse, down to from forty-three to fifty days, depending on how much time is required to produce adequate roots.

[0276] Alternately, an Agrobacterium-mediated SSI method is used. The T-DNA delivered contains SPCN, WUS2, ODP2 and DsRED expression cassettes within the flanking FRT1 and FRT87 recombination sites (PHP4, SEQ ID NO: 36) with the following T-DNA (RB+UBI PRO:UBI1ZM INTRON::MO-FLP::PINII TERM+CaMV35S TERM+FRT1:CTP::SPCN::PINII TERM:FRT87+UBI PRO::UBI1ZM INTRON::DsRED+NOS PRO::ZM-WUS2::PINII TERM+UBI PRO:UBI1ZM INTRON::ZM-ODP2::PINII TERM+LB). The T-DNA is delivered via Agrobacterium-mediated transformation into target lines with FRT1-FRT87 landing sites as described in U.S. Patent Appln. No. 20170240911, incorporated herein by reference in its entirety. Precise RMCE events are identified using a multiplex PCR assay as described in U.S. Patent Appln. No. 20170240911, incorporated herein by reference in its entirety. The use of SPCN in the promoter trap, along with the NOS PRO::WUS2+UBI PRO::ODP2 expression cassettes for Agrobacterium SSI reduces the SSI process by several weeks (at least three to four weeks), compared to the previous transformation method for generating SSI events.

### Example 12: Improved Recovery of Site-Specific Recombination Soy Events with SPCN Gene and Spectinomycin Selection

[0277] Soybean site specific integration (SSI) is done using a microbial delivery system. In soybean, there are two microbial transformation systems available for SSI transformation: the Ochrobactrum embryonic axis (EA) system disclosed in U.S. Patent Appln. No. 20180216123, incorporated herein by reference in its entirety and the Agrobacterium Immature Cotyledon (IC) system disclosed in U.S. Provisional Patent Appln. No. 62/610,540, filed Dec. 27, 2017, incorporated herein by reference in its entirety.

[0278] In the Agrobacterium Immature Cotyledon (IC) system immature soybean seeds are surface sterilized in a 50 mL screw cap tube containing 50 mL of a 10% bleach, 0.02% Tween-20 solution, with slight agitation for fifteen minutes and are then rinsed ten times with a total of 500 mL of sterile distilled water. Immature cotyledons are aseptically excised by cutting the embryo axis off the cotyledons and then pushing the cotyledons out of the seed coat onto sterile 7.5 cm filter paper moistened with sterile distilled water in a deep petri dish (25×100 mm). Twenty to Twenty-five isolated immature cotyledons are transferred into a sterile glass tube (16×100 mm) containing 400 μL of an Agrobacterium inoculum. Sonication (one second) is performed in a sonic water bath (VWR 50T). After sonication, the immature cotyledons are left in the inoculum for fifteen minutes at room temperature for infection. After fifteen minutes of infection, immature cotyledons from two glass tubes are poured onto double layered sterile filter papers (total 800 μl/double layered filter) in a deep petri dish and then the petri dishes are wrapped with two layers of Parafilm for co-cultivation for four days at 21° C. in a Percival brand incubator at a light intensity of 3-5 μE/m²/s.

[0279] After four days of co-cultivation, immature cotyledons are washed off the filter paper with S30 medium supplemented with 300 μg/mL timentin antibiotic and are rinsed three times to remove residual Agrobacterium. The immature cotyledons are then transferred to a 250 mL sterile glass flask (40-50 immature cotyledons/flask) containing 40-50 mL S30 medium supplemented with 300 mg/L timentin antibiotic to kill the Agrobacterium without selection, and are cultured at 25-26° C. with an 18-hour photoperiod at 35-60 μE/m²/s light intensity for seven days on rotary shaker at 100 rpm for the recovery period.

[0280] Following the recovery period, a selection agent is used for the selection of stable transformants. The recovery medium is replaced with 40-50 mL S30 medium supplemented with the selection agent for the selection of transformed cells. The selection medium is replaced bi-weekly and cultured at 25-26° C. with 18-hour photoperiod at 35-60 μE/m²/s light intensity on a rotary shaker at 100 rpm. After four to eight weeks on selection medium, transformed tissue becomes visible as green tissue against a background of bleached, less healthy tissue.

[0281] Putative transformed green callus is isolated under a microscope and plated onto petri plates with sterile filter paper overlaying M7 agar medium supplemented with 300 mg/L timentin for embryo maturation. The petri plates are sealed with Micropore™ surgical tape (3M Health Care, St. Paul, Minn., USA) and incubated at 26° C. with an 18-hour photoperiod at 35-60 μE/m²/s light intensity. After three to four weeks of maturation on M7 medium, mature somatic embryos are placed in sterile, petri dishes and either sealed with Micropore™ surgical tape or placed unsealed in a plastic box for four to seven days at room temperature for somatic embryo desiccation. After four to seven days, desiccated embryos are plated onto M8 medium supplemented with the selection agent and are allowed to germinate at 26° C. with an 18-hour photoperiod at 35-60 μE/m²/s light intensity. After four to six weeks on M8 germination medium, plantlets are transferred to four inch pots containing moistened Berger BM2 soil (Berger Peat Moss, Saint-Modeste, Canada) and kept enclosed in clear plastic tray boxes until acclimatized in a culture room with a 16-hour photoperiod at 90-150 μE/m²/s and 26° C. day/24° C. night temperatures. After acclimation, hardened plantlets are potted in 2 gallon pots containing moistened Berger MB1 (Berger Peat Moss, Saint-Modeste, Canada) and grown in a greenhouse to seed-bearing maturity.

[0282] In both systems (Ochrobactrum embryonic axis (EA) system and Agrobacterium Immature Cotyledon (IC) system, SPCN selection attenuates selection pressure and allows time for recombination to occur and thus produces site-specific integration (SSI) plants at a higher frequency than other selectable marker genes such as the ALSand hygromycin plant selectable marker genes.

[0283] Ochrobactrum EA SSI, was performed using a target line generated in the soybean genotype 93B86. The target line was generated by Agrobacterium-mediated immature cotyledon transformation using plasmid PHP49452 (SEQ ID NO.: 37) containing the expression cassette RB+GM-SAMS PRO-GM-SAMS UTR-GM SAMS INTRON1-GM-SAMS UTR2-FRT1:CAMV35S PRO:HYGNOS TERM+GM-UBQ PRO-GM-UBQ 5UTR:ZS-YELLOW:NOS TERM-FRT87+LB. Homozygous EAs derived from this target line were retransformed with three different binary plasmids, PHP92521 (SEQ ID NO: 38) containing the expression cassette RB+AT-UBIQ10 PRO:FLP:UBQ3TERM+FRT1-CTP-SPCN:UBQ10 TERM++GM-MYH11:DS-RED:PINII-FRT87+LB, PHP92985 (SEQ ID NO: 39) containing the expression cassette RB+GM-EF1A2PRO:FLP:UBQ10 TERM+FRT1-CTP-SPCN:UBQ3 TERM++GM-MYH11PRO:DS-RED:PINII-FRT87+LB, and PHP93448 (SEQ ID NO: 40) containing the SPCN expression cassette flanked by the and FRT87 sites (RB+GMEF1A2 PRO:FLP:UBQ3 TERM+FRT1-CTP-SPCN:UBQ10 TERM+FMVENH+PCSV EHN+MMV ENH+GM-MTH1:DS-RED:PINII-FRT87+LB). Following Ochro-EA re-transformation of the target line, SSI events were recovered on a media supplemented with spectinomycin to select events that were transformed with the SPCN selectable marker gene replacing the hygromycin gene in the target line. The transformation protocol included of the following steps: i) dry seeds were sterilized with chlorine gas in a closed chamber in a chemical hood; ii) the sterilized seeds were imbibed for 6-8 hours on 5 g/L sucrose and 6 g/L agar medium followed by overnight soaking in water; iii) embryonic axes explants were isolated either manually or with the assistance of mechanical tools; iv) the embryonic axes were infected with Ochrobactrum containing SSI vectors with the SPCN selectable marker gene; v) explants were placed on co-cultivation medium for three to four days; vi) explants were transferred to selection medium (spectinomycin 25 mg/L) immediately after co-cultivation or allowed to recover on medium without selection for one to two days; vii) after continued biweekly subculture on shoot elongation medium with selection, elongated shoots were harvested at around six weeks for rooting, and viii) T0 plants with roots were sent to the greenhouse. The plants selected on spectinomycin were recovered and were analysed by qPCR. The SSI events were identified using a number of assays designed to detect the target and donor DNA. Specifically, SSI events were identified using qPCRs for detecting the target DNA and the donor DNA following selection on media supplemented with spectinomycin. Events positive for FRT1 and FRT87 junctions with one copy each of SPCN, ZS-YELLOW, and target line were considered SSI events. The results are shown in Table 6). Specifically, the transformation data detailing the number of EAs infected, total shoots harvested, T0 plants generated, the transformation frequency and the SSI frequency using Ochro-EA transformation of soybean with SPCN as the selectable marker gene are shown in Table 6.

TABLE 6

| | | | ZS- | Target | | FRT1: | PSE: | DS- | | | | |
|---|---|---|---|---|---|---|---|---|---|---|---|---|
| Plant | SSI | SPCN | YELLOW | line | PSE_3_1 | CTP | FRT 87 | RED | PSD_15_1 | PSC_26_1 | FLPM | NPTII |
| ID | (+/−) | Copy # | Copy # | (+/−) | Copy # | (+/−) | (+/−) | Copy # | (+/−) | (+/−) | (+/−) | (+/−)I |
| 1 | + | 1 | 1 | + | 1 | + | + | 1 | − | − | − | − |
| 2 | − | 1 | 1 | + | 0 | + | − | 0 | − | − | − | − |
| 3 | + | 1 | 1 | + | 1 | + | + | 1 | − | − | − | − |
| 4 | − | 1 | 0 | + | 0 | + | − | 0 | + | − | − | − |
| 5 | + | 1 | 1 | + | 1 | + | + | 1 | − | − | − | − |
| 6 | + | 1 | 1 | + | 1 | + | + | 1 | − | + | − | − |
| 7 | + | 2 | 1 | + | 1 | + | + | 1 | − | − | − | − |

[0284] The transformation data detailing the number of EAs infected, total shoots harvested, T0 plants generated, the transformation frequency and the SSI frequency using Ochro-EA transformation of soybean with SPCN as the selectable marker gene are shown in Table 7.

TABLE 7

| | # of EAs | # of shoots | # ofT0 plants | SSI |
|---|---|---|---|---|
| Vector ID | infected | harvested | generated | Frequency |
| PHP92521 | 662 | 10 (1.5%) | 3 (0.45%) | 2 (0.3%) |
| PHP92985 | 720 | 3 (0.41%) | 2 (0.27%) | 2 (0.27%) |
| PHP93448 | 716 | 6 (0.83%) | 2 (0.27%) | 1 (0.13%) |

[0285] When Agrobacterium-mediated transformation was used to deliver T-DNA into soybean immature cotyledons, SSI events were recovered when SPCN was used in the promoter-trap for selection (US Patent Application No. 20140157453, incorporated herein by reference in its entirety). For Agrobacterium-mediated transformation of immature cotyledons, the following steps were included: i) seed pods were opened and immature seeds of 2-4 mm were removed and surface sterilized with 5% Clorox bleach for ten minutes, then the seeds were rinsed three times with sterile, distilled water; ii) the cotyledons were excised and pre-cultured in S30 medium in flasks for two days; iii) the immature cotyledons were then infected by adding a solution of Agrobacterium (OD 0.5 at 500 nm) in M5 infection medium (U.S. Pat. No. 8,962,328 incorporated herein by reference in its entirety); iv) the explants were co-cultured with the Agrobacterium for days days at 21° C.; v) the explants were washed with liquid medium containing 300 mg/L Timentin and transferred to liquid medium with 300 mg/L Timentin to recover for one week; vi) the explants were transferred to selection medium with 300 mg/L Timentin and 25 mg/L spectinomycin for four to five weeks with medium changes every two weeks; vii) healthy, growing events were transferred to maturation medium for tree weeks; viii) the healthy embryos were dried down for one week and germinated on germination medium; and ix) T0 plantlets were potted to soil in the greenhouse.

### Example 13. SPCN Gene and Spectinomycin Selection for Canola Transformation

[0286] Seeds of Brassica napus were surface sterilized in a 50% Clorox solution and germinated on solid medium containing MS basal salts and vitamins. The seedlings were grown at 28° C. in the light for ten to fourteen days, and the hypocotyls were dissected away from the cotyledons. The hypocotyl explants were transferred into 100×25 mm petri plates containing 10 mls of 20A medium with 200 mM acetosyringone and then sliced into sections 3-5 mm long. After slicing, 40 μl of Agrobacterium solution (at an Optical Density of 0.50 at 550 nm) containing PHP88871 (SEQ ID NO: 6) was added to the plates, and the petri plates containing the hypocotyl/Agrobacterium mixture were placed on a shaker platform and lightly agitated for ten minutes. After ten minutes of gentle agitation, the plates were moved into dim light and 21° C. for three days of co-cultivation.

[0287] After co-cultivation, the hypocotyl explants were removed from the Agrobacterium solution, and lightly blotted onto sterile filter paper before placing onto 70A selection media (containing 10 mg/l spectinomycin) and moved to the light room (26° C. and bright light). Explants remained on 70A selection media for two weeks prior to transfer to a second round of 70A selection (alternatively, explants were moved to 70B medium with 20 mg/l spectinomycin for the second round of selection). After two rounds of selection the explants were transferred to 70C shoot elongation media for two to three weeks and placed back into the light room. Shoots were then transferred onto 90A rooting media before being transferred to soil in the greenhouse. The production of transgenic shoots exhibiting spectinomycin resistance occurred at a frequency of approximately 60-70% relative to the number of starting hypocotyl explants (datat not shown).

### Example 14. SPCN Gene and Spectinomycin Selection for Sunflower Transformation

[0288] A. Agrobacterium strain LBA4404 THY- was used for sunflower (Helianthus annuus variety F1503LG) transformation. Mature dry sunflower seeds were sterilized in a bleach solution (10-15% v/v in water with one drop of Tween detergent) for fifteen (15) minutes and then rinsed three (3) times in sterile water. Seeds were imbibed overnight. The embryos were removed from the softened hulls. Once the embryos were isolated, incisions were made at the base of the cotyledons to facilitate embryo isolation thereby exposing the leaf primordia sheathing the apical meristem. The radical tip was left attached to the embryo. After isolation, embryo axes (EAs) were transferred to petri plates for infection. The Agrobacterium strain containing plasmid PHP92349 (SEQ ID NO: 41) with a T-DNA containing expression cassettes for the SPCN (spectinomycin resistance) and DS-RED2 (fluorescence) genes, specifically containing RB+LOXP+GM-QBU PRO::CTP:SPCN::UBQ14 TERM+GM-EF1A2 PRO::DS-RED2::UBQ3 TERM+LOXP+LB was used for transformation. The Agrobacterium strain was suspended in 20A media and the concentration of the bacterial suspensions were adjusted to 0.5 OD550. The EAs were then placed under vacuum with gentle agitation for twenty (20) minutes. The EAs were removed from the Agrobacterium and inserted radicle-end down into 272AC medium (standard MS salts and vitamin levels (Murashige and Skoog, 1962, Physiol. Plant 15:473-497), 0.1 g/l myo-inositol, 50 mg/l thymidine, 100 uM acetosyringone, 0.1 mg/l BAP, 40 g/l sucrose, 6 g/l Bacto Agar, pH 5.6), leaving the apical dome above the 272AC medium, and placed under dim light at 21° C. for three days of co-cultivation. After co-cultivation, the EAs were transferred to 272AB spectinomycin selection media (standard MS salts and vitamin levels (Murashige and Skoog, 1962, Physiol. Plant 15:473-497), 0.1 g/l myo-inositol, 10 mg/l meropenum, 0.1 mg/l meta-Topolin (mT), 30 mg/l spectinomycin dihydrochloride, 0.1 ug/l, 40 g/l sucrose, 6 g/l Bacto Agar, pH 5.6) under full light at 28° C.

[0289] The EAs were allowed to grow, with periodic trimming of bleached leaves. Within approximately three weeks after exposure to spectinomycin, green sectors or whole green leaves were observed. This green tissue also expressed DS-RED, confirming that the T-DNA from PHP92349 had been integrated. For rooting, transgenic events were transferred to a Bio-Dome Sponge rooting material (Park Seed Co., 3507 Cokesbury Road, Hodges, S.C.). After transfer to the Bio-Dome Sponge rooting material, roots formed within one to three weeks and the plants were potted and transferred to the greenhouse or growth-chambers. Transgenic plantlets were recovered at a rate of 1% (relative to the number of starting explants infected with Agrobacterium). These results (data not shown) demonstrated that the SPCN gene was a useable selectable marker for rapid detection of transformed events and for improving transformation efficiency in sunflower.

B. Seeds of Helianthus annuus were surface sterilized for 15 minutes in a 50% Clorox solution, rinsed three times with sterile distilled water, and then soaked overnight in water to soften the seed coat and were germinated on solid medium containing MS basal salts and vitamins. Embryos were removed from the seed coat by squeezing the large end of the seed and pulling the embryo out. If the seed coat was still firm, the coat was scored with the tip of a #11 scalpel blade to help release the embryo. Once the embryo was isolated, one cotyledon was scored near the base (just above where the cotyledon meets the radical). The scalpel blade was positioned between the cotyledons and twisted to remove one of the cotyledons. At this point, the plumule was exposed against the other cotyledon. The tip of the #11 scalpel blade was placed along the inside base of the remaining cotyledon and cut across the plumule to remove both the cotyledon and tip of the plumule, leaving the meristem and radicle as the target explants for transformation. The target explants were placed in a petri plate. Once all explants had been transferred to the petri dish, an Agrobacterium suspension (OD 0.50 at 550 nm) containing PHP81356 (SEQ ID NO: 7) was added to the plant tissue, adding enough Agrobacterium suspension to cover the explants. Agrobacterium was prepared in 20A media supplemented with 200 mM acetosyringone. The suspension containing the sunflower explants and the Agrobacterium was placed on a shaker platform and gently agitated under standard house vacuum for 10-15 minutes.

[0290] Explants were then removed from the Agrobacterium suspension and placed onto solid medium 710I (containing no 2,4-D) or 272V medium (with 200 mM acetosyringone, 0.1 mg/L BAP), with the radical in contact with the medium and the apical meristem end up. The co-cultivation plates were then placed under dim light at 21° C. for overnight co-culture. After co-culture explants were moved to 272M (272X medium plus 1 mg/L meropenem) supplemented with 40 mg/L spectinomycin and then placed into the light room (26° C., 16 hours light).

[0291] After two weeks, the first leaves emerging from the plantlets were typically bleached, and were trimmed back close to the meristem and the plantlets were placed back into the light room. When vigorous, green leaves were observed, care was taken to trim away as much of the bleached leaves as possible to give preference to the emerging green growth. Plantlets with emerging green leaves were moved to fresh media with reduced spectinomycin (20 mg/L). If lateral roots were observed growing from the radicle, no further stimulation was required for root growth. If spontaneous root growth was not observed, the plantlets were moved to 272 medium (4.3 g MS basal salt mixture, 0.1 g myo-inositol, 0.5 mg nicotinic acid, 1 mg thiamine HCl, 0.5 mg pyridoxine.HCl, 2 mg glycine, 40 g sucrose, 1.5 g Gelrite, pH 5.6.) with 0.1 mg/L NAA (naphthaleneacetic acid). Once a green shoot was established the new plantlet was removed from the spectinomycin selection. Transgenic plantlets were recovered at a rate of 1% (relative to the number of starting explants infected with Agrobacterium).

### Example 15. SPCN Gene and Spectinomycin Selection for Cassava Transformation

[0292] Leaf-petiole explants (whole immature leaves with 1-1.5 mm of the petiole attached) are excised from six to eight-week old plantlets of cassava cultivar TME7 and are placed on MS basal medium (2% sucrose, 0.8% Noble agar, 1 μM 2,4-D and 1 μM meta-Topolin (mT) (see Chauhan and Taylor, 2018 Plant Cell Tiss Organ Cult 132:219-224)). For cassava, expression cassettes containing either the wild-type Streptomyces spectabilis SPCN gene (SEQ ID NO: 9) or the soy-codon-optimized version of the gene (SEQ ID NO: 13) can be used (both of which encode the same protein, SEQ ID NOs: 10 and 14). After two weeks of culture, green nodular structures form which can be used as the target explant for Agrobacterium-mediated transformation using PHP88871 (SEQ ID NO: 6) (OD 0.50 at 550 nm). The Agrobacterium suspension is added to the plant tissue to a volume sufficient to cover the explants. Agrobacterium is prepared in 20A media supplemented with 200 mM acetosyringone. The suspension containing the cassava explants and the Agrobacterium is placed on a shaker platform and gently agitated under standard house vacuum for ten to fifteen minutes. Explants are then removed from the Agrobacterium suspension and placed onto solid medium containing 1 μM meta-Topolin (mT) with 200 mM acetosyringone. The co-cultivation plates are then placed under dim light at 21° C. for overnight co-culture. After co-culture explants are moved onto solid medium containing 1 μM meta-Topolin (mT) plus 40 mg/L spectinomycin and then placed into the light room (26° C., 16-hours light). After two weeks, the first leaves emerging from the plantlets are typically bleached, and are trimmed back close to the meristem and the plantlets placed back into light room. When vigorous, green leaves are observed, care is taken to trim away as much of the bleached leaves as possible to give preference to the emerging green growth. Plantlets with emerging green leaves are moved to fresh media with reduced spectinomycin (20 mg/L). If lateral roots are observed growing from the radicle, no further stimulation is required for root growth. If spontaneous root growth is not observed, the plantlets are moved to 272 medium with 0.1 mg/L NAA (naphthaleneacetic acid). Once a green shoot is established the new plantlet is removed from the spectinomycin. Using this method, transgenic plantlets are recovered at a rate of 1-3% (relative to the number of starting explants infected with Agrobacterium).

### Example 16. SPCN Gene and Spectinomycin Selection for Soybean Transformation

[0293] Mature dry seed from soybean lines were surface-sterilized for sixteen hours using chlorine gas, produced by mixing 3.5 mL of 12 N HCl with 100 mL of commercial bleach (5.25% sodium hypochloride), as described by Di et al., ((1996) Plant Cell Rep 15:746-750). Disinfected seeds were soaked in sterile distilled water at room temperature for sixteen hours (100 seeds in a 25×100 mm petri dish) and imbibed on semi-solid medium containing 5 g/L sucrose and 6 g/L agar at room temperature in the dark. After overnight incubation, the seeds were soaked in distilled water for an additional three to four hours at room temperature in the dark. Intact embryonic axes (EA) were isolated from cotyledons. Ochrobactrum-mediated EA transformation was carried out as described herein and disclosed in U.S. Patent Appln. No. 20180216123, incorporated herein by reference in its entirety. The compositions of various cultivation media used for soybean EA transformation and plant regeneration are summarized in Table 17.

[0294] A volume of 10 mL of Ochrobactrum haywardense HI suspension (OD 0.50 at 600 nm) in infection medium containing 300 mM acetosyringone was added to the EA. The embryonic axes were co-cultivated with the Ochrobactrum haywardense HI suspension containing PHP82311 (SEQ ID NO: 26), PHP82312 (SEQ ID NO: 27), PHP82313 (SEQ ID NO: 28) or PHP82314 (SEQ ID NO: 8). The plates were sealed with parafilm (“Parafilm M” VWR Cat #52858), then sonicated (Sonicator-VWR model 50T) for thirty seconds. After sonication, about 90-500 embryonic axes were transferred to a single layer of autoclaved sterile filter paper (VWR #415/Catalog #28320-020). The plates were sealed with Micropore tape (Catalog #1530-0, 3M, St. Paul, Minn.)) and incubated under dim light (1-2 μE/m²/s), cool white fluorescent lamps for sixteen hours at 21° C. for three days. After co-cultivation, the base of each EA was embedded in shoot induction (SI) medium containing Spectinomycin 25 mg/L and 500 mg/L Cefotaxime. Shoot induction was carried out in a Percival Biological Incubator or growth room at 26° C. with a photoperiod of sixteen hours and a light intensity of 60-100 μE/m²/s. After three to six weeks in selection medium, transformed spectinomycin-resistant shoots were produced from infected meristems of EA. The transformed shoots were cut and transferred to rooting medium for further shoot and root elongations.

[0295] Spectinomycin resistant healthy shoots were produced from the shoot apical meristem of embryonic axes of Soybean variety 93Y21 transformed with Ochrobactrum haywardense HI suspension containing PHP82311 (SEQ ID NO: 26), PHP82312 (SEQ ID NO: 27), PHP82313 (SEQ ID NO: 28) or PHP82314 (SEQ ID NO: 8). Most of the spectinomycin resistant shoots expressed red fluorescent protein (RFP). Untransformed apical meristem of embryonic axes, on the other hand, were bleached in selection medium containing spectinomycin at concentrations of 25 mg/L or higher. Soybean embryonic axes transformed with Ochrobactrum haywardense HI containing SPCN expression cassettes PHP82313 (SEQ ID NO: 28) or PHP82314 (SEQ ID NO: 8) showed an even expression pattern of RFP in the spectinomycin resistant shoots, while PHP82311 (SEQ ID NO: 26) and PHP82312 (SEQ ID NO: 27) showed an uneven expression pattern of RFP in the spectinomycin resistant shoots which indicated chimeric expression (data not shown). Transformed shoots of 0.5 to 2 cm in height were produced within five to six weeks of transformation. Transformation efficiencies (relative to the number of embryonic axes transformed with Ochrobactrum haywardense HI containing vectors) ranged from 10% to 17.4% as shown in Table 8 below.

TABLE 8

| | Total number of | Total number of spectinomycin |
|---|---|---|
| | embryonic axes | resistant shoots showing RFP |
| Construct | transformed | expression (% TE) |
| PHP82311 (SEQ ID | 158 | 16 (10.1%) |
| NO: 26) | | |
| PHP82312 (SEQ ID | 161 | 28 (17.4%) |
| NO: 27) | | |
| PHP82313 (SEQ ID | 166 | 25 (15.1%) |
| NO: 28) | | |
| PHP82314 (SEQ ID | 160 | 16 (10.0%) |
| NO: 8) | | |

[0296] Embryonic axes of soybean varieties 93Y21, P29T50, P33T60, DM118, 98C11 and 98C21 transformed with Ochrobactrum haywardense HI containing PHP82314 (SEQ ID NO: 8), as described in this Example 17, produced spectinomycin resistant healthy shoots from the shoot apical meristem of the embryonic axes. All varities produced transformed T0 events two and a half to three months after transformation. Transformation efficiencies ranged from 0.5 to 21.3% at T0 event production as shown in Table 9 below.

TABLE 9

| | Number of T0/Number of EAs | |
|---|---|---|
| Variety | transformed | TE % |
| 93Y21 | 101/744 | 13.6 |
| P29T50 | 36/169 | 21.3 |
| P33T60 | 22/711 | 3.1 |
| DM118 | 9/498 | 1.8 |
| 98C11 | 2/440 | 0.5 |
| 98C21 | 94/644 | 15.7 |

### Example 17. Tobacco Leaf Disc Transformation Using APH and Spectinomycin Genes as Selectable Markers

[0297] Tobacco leaf disk transformation was performed as described by Gallois and Marinho (Methods Mol Biol 49:39-48, 1995). Tobacco plants (Nicotiana tabacum cv Petite Havana SR1, Catalog #NT-02-20-01, Lehle Seeds, Round Rock, Tex.) were aseptically cultured in a sterile polypropylene container (Catalog #0701, International Container Corp, Severn, Md.) containing half-strength Murashige and Skoog (MS) medium with 1.5% sucrose and 0.3% Gelrite under sixteen hours light (50-70 μE/m²/s cool white fluorescent lamps) at 26° C. Log phase Agrobacterium tumefaciens strain AGL1 cultures without a binary vector (Negative Control) and with a binary vector PHP81354 (SEQ ID NO: 30), PHP81355 (SEQ ID NO: 29), PHP81356 (SEQ ID NO: 7) or PHP81359 (SEQ ID NO: 31) were centrifuged at 3,000×G for ten minutes and the respective cell pellets of AGL1 were then diluted to an OD 0.50 at 600 nm with liquid co-cultivation medium composed of MS medium (pH 5.2) with 1 mg/L N6-benzyladenine (BA), 1% glucose and 200 μM acetosyringone.

[0298] Sterile tobacco leaves were excised from plants and soaked in 20 mL of AGL1 culture, containing a Negative Control (without a binary vector) or with a binary vector, namely, PHP81354 (SEQ ID NO: 30), PHP81355 (SEQ ID NO: 29), PHP81356 (SEQ ID NO: 7) or PHP81359 (SEQ ID NO: 31), in liquid co-cultivation medium in 100×25 mm Petri dishes for five minutes. Leaves were then cut into approximately 3×3 mm segments and the leaf pieces were then fully submerged in 20 mL of the AGL1 culture, containing a Negative Control (without a binary vector) or with a binary vector PHP81354 (SEQ ID NO: 30), PHP81355 (SEQ ID NO: 29), PHP81356 (SEQ ID NO: 7) or PHP81359 (SEQ ID NO: 31) for five minutes. Leaf segments were blotted onto autoclaved filter paper, then incubated on solid co-cultivation medium composed of MS medium (pH 5.2) with 1 mg/L BA, 1% glucose, 200 acetosyringone and Phytoagar (Catalog #A175, PhytoTechnology Laboratories, Shawnee Mission, Kans.) under sixteen hours light (80-110 μE/m²/s, cool white fluorescent lamps) at 24° C.

[0299] After three days of co-cultivation, twenty leaf segments/plate were transferred to shoot induction medium composed of MS solid medium (pH 5.7) with 1 mg/L BA, 3% sucrose, 0.3% Gelrite, 250 μg/mL Timentin containing 0, 250, 500, or 1,000 μg/mL spectinomycin. Tobacco leaf disks transformed with empty AGL1 (Negative Control) were completely bleached on shoot induction medium containing 250, 500, and 1,000 μg/mL spectinomycin. Conversely, tobacco leaf disks transformed with AGL1 containing a binary vector PHP81354 (SEQ ID NO: 30), PHP81355 (SEQ ID NO: 29), PHP81356 (SEQ ID NO: 7) or PHP81359 (SEQ ID NO: 31) produced dark green, healthy, spectinomycin-resistant shoots (>hundreds/plate) on shoot induction medium containing 250, 500, and 1,000 μg/mL spectinomycin within two to four weeks after transformation.

### Example 18. Soybean Hairy Root Transformation Using the Spectinomycin Gene (SPCN or APH) as a Selectable Marker

[0300] Soybean hairy root transformation was done as described by Cho et al. (Planta 210:195-204, 2000). Soybean 93Y21 seeds were surface-sterilized by soaking in 20% (v/v) commercial bleach, 5.25% (v/v) sodium hypochlorite, with Tween 20 (0.1%) for twenty minutes and then rinsed five times in sterile distilled water. Sterilized seeds were germinated on sucrose (0.5%) and agar (1.2%) medium under sixteen hours light (45 μE/m²/s cool white fluorescent lamps) at 25° C. Agrobacterium rhizogenes strain K599 cultures without a binary vector (Negative Control) or with a binary vector PHP81354 (SEQ ID NO: 30, (SAMS PRO::APH)), PHP81355 (SEQ ID NO: 29, (SAMS PRO::SPCN)), PHP81356 (SEQ ID NO: 7, (UBI PRO::SPCN)) or PHP81359 (SEQ ID NO: 31, (UBI PRO::APH)) were grown to log phase. The Agrobacterium cells were centrifuged at 3,000×G for ten minutes, and then the cell pellet was diluted to an OD 0.50 at 600 nm by adding liquid co-cultivation medium to the bacteria. The co-cultivation medium was composed of MS (PhytoTechnology M404) liquid medium (pH 5.2) with 30 g glucose and 300 μM acetosyringone.

[0301] Cotyledons from four to five day old-soybean seedlings were harvested and infected by first wounding the abaxial surface of the leaf with a scalpel, then adding the wounded leaf tissue to 20 ml of K599 culture, containing a Negative Control (no binary vector) or a binary vector PHP81354 (SEQ ID NO: 30, (SAMS PRO::APH)), PHP81355 (SEQ ID NO: 29, (SAMS PRO::SPCN)), PHP81356 (SEQ ID NO: 7, (UBI PRO::SPCN)) or PHP81359 (SEQ ID NO: 31, (UBI PRO::APH)) in liquid co-cultivation medium in 100×25 mm Petri dishes. The cotyledons were then fully submerged in the 20 ml of K599 culture, containing the Negative Control (no binary vector) or the binary vector PHP81354 (SEQ ID NO: 30, (SAMS PRO::APH)), PHP81355 (SEQ ID NO: 29, (SAMS PRO::SPCN)), PHP81356 (SEQ ID NO: 7, (UBI PRO::SPCN)) or PHP81359 (SEQ ID NO: 31, (UBI PRO::APH)) for twenty-five minutes.

[0302] Cotyledons were cultured abaxial side up on double-layer filter paper immersed in 4 ml sterile distilled water. Three days after inoculation, cotyledons were transferred (abaxial side up) to selection medium, MS (Murashige and Skoog 1962) basal nutrient salts, B5 (Gamborg et al. 1968) vitamins and 3% sucrose (pH 5.7), solidified with 3 g/L Gelrite (Greif Bros. Corp., East Coast Division, Spotswood, N.J., USA) with 250 mg/L Timentin and 0, 50, 100, 250 or 500 spectinomycin respectively. Cotyledons inoculated with K599 lacking the binary vector (Negative Control) produced only a small amount of callus at the infection sites on the cotyledons in spectinomycin containing medium. On the other hand, soybean cotyledons transformed with K599 containing any of the binary vectors PHP81354 (SEQ ID NO: 30, (SAMS PRO::APH)), PHP81355 (SEQ ID NO: 29, (SAMS PRO::SPCN)), PHP81356 (SEQ ID NO: 7, (UBI PRO::SPCN)) or PHP81359 (SEQ ID NO: 31, (UBI PRO::APH)) produced highly branched hairy roots which developed from each wound site on the cotyledons in the presence of spectinomycin fourteen to sixteen days after selection.

### Example 19. Cowpea Embryonic Axis Transformation Using the SPCN Gene as a Selectable Marker

[0303] Cowpea was used for Agrobacterium-mediated transformation of embryonic axis. Transgenic events were obtained by transforming embryonic axes using Agrobacterium strain LBA4404 containing PHP71539 (SEQ ID NO: 1) and PHP86170 (SEQ ID NO: 25). PHP86170 (SEQ ID NO: 25) carries SPCN and DS-RED expression cassettes. Cowpea seeds were sterilized with 20% Clorox bleach for fifteen minutes, rinsed three times in sterile, distilled water, and then imbibed in water overnight. Fifty embryonic axes were isolated manually and were suspended in Infection Medium (Table 18) with Agrobacterium (OD 0.5 at 550 nm) containing PHP71539 (SEQ ID NO: 1) or PHP86170 (SEQ ID NO: 25) for two to three hours. Explants were then transferred to Co-cultivation Medium (Table 18) for three days in an incubator at 21° C. in the dark. After co-cultivation, explants were transferred to shoot regeneration medium (SIM) (Table 18) containing 25 mg/L spectinomycin. Explants that developed shoots after four weeks were transferred again to SIM plus spectinomycin for an additional three to four weeks. Transgenic shoots with DsRed expression were then moved onto shoot elongation medium plus spectinomycin (Table 18). Well-developed shoots were transferred to rooting medium with spectinomycin (Table 18) for three to five weeks, and healthy plants were sent to the greenhouse. The timeframe from Agrobacterium infection to sending T0 plantlets to the greenhouse was rapid (˜four months), and the transformation frequency was 4%.

### Example 20: SPCN Selection Improves Recovery of Cas9/CRISPR-Mediated Genomic Modified Events

[0304] CAS9-mediated targeted homologous recombination is used to select for events in which the PRO::UBI1ZM 5′ UTR::UBI1ZM INTRON1:FRT1:CTP::SPCN::SB-UBI TERM (PHP91619, SEQ ID NO: 3) expression cassette is introduced into the maize liguleless1 locus. The experimental design used here reproduces that described in Svitashev et al. (2015, Plant Physiol. 169:931-945) utilizing the same plasmids, T-DNA components, expression cassettes, Particle Gun-mediated transformation, culturing media, and maize germplasm (Hi-II) as those described in the above article with one exception. Svitachev used a UBI1ZM PRO::moPAT::pinII TERM expression cassette in between the two flanking homology arms (sequences from the ligulelessl locus that were upstream (1099-bp) or downstream (1035-bp) of the LIG-CR3-guided cut site in the genome), while the PRO::UBI1ZM 5′ UTR::UBI1ZM INTRON1:FRT1:CTP::SPCN::SB-UBI TERM (PHP91619, SEQ ID NO: 3) sequence replaces the moPAT expression cassette between the two liguless1 homology arms in this example. All other experimental parameters are identical in order to compare the efficiency of SPCN selection for recovery of homology directed repair (HDR) events relative to the efficiency reported for moPAT selection by Svitashev et al.

[0305] Using the particle gun, the plasmid containing the donor cassette (Homology Arm+PRO::UBI1ZM 5′ UTR::UBI1ZM INTRON1:FRT1:CTP::SPCN::SB-UBI TERM (PHP91619, SEQ ID NO: 3)+Homology Arm) is co-bombarded with 1) a plasmid containing CAS9 and LIG-CR3 gRNA expression cassettes, 2) ZM-AXIG1 PRO::ZM-WUS2::IN2-1 TERM (SEQ ID NO: 5), and 3) ZM-PLTP PRO::ZM-PLTP 5′ UTR::ZM-ODP2::OS-T28 TERM (SEQ ID NO: 4). After transformation, the immature embryos culture, selection and regeneration are performed as described in Gordon-Kamm et al. (2002, PNAS 99:11975-11980) except that the herbicide bialaphos is replaced with 50 mg/L streptomycin. After progressing through callus selection, somatic embryo maturation and plant regeneration on streptomycin as the selective agent, healthy green plantlets are recovered. The frequency of recovering streptomycin resistant plants is similar to the results observed in Svitashev et al. with the moPAT gene and bialaphos selection, and molecular analysis confirms a similar number of precisely-integrated donor sequences into the liguleless1 locus via homologous recombination.

### Example 21. SPCN Gene and Spectinomycin Selection for Cotton Transformation

[0306] Seeds of cotton lines are surface sterilized in a 50% Clorox solution or for sixteen hours using chlorine gas, produced by mixing 3.5 mL of 12 N HCl with 100 mL of commercial bleach (5.25% sodium hypochloride), as described by Di et al., (1996) Plant Cell Rep 15:746-750. Disinfected seeds are soaked in sterile distilled water at room temperature for sixteen hours (100 seeds in a 25×100 mm petri dish) and imbibed on semi-solid medium containing 5 g/L sucrose and 6 g/L agar at room temperature in the dark. After overnight incubation, the seeds are soaked in distilled water for an additional three to four hours at room temperature in the dark. Intact embryonic axes (EA) are isolated from cotyledons

[0307] Ochrobactrum or Agrobacterium-mediated EA or hypocotyl transformation is carried out as described below. The bacterial strains used for transformation included Ochrobactrum haywardense HI strain containing a Ri plasmid PHP81184 (SEQ ID NO: 42) or different strains of Agrobacterium including AGL1, LBA4404 with or without PHP70298 (SEQ ID NO: 43), PHP71539 (SEQ ID NO: 1) and PHP79761 (SEQ ID NO: 44).

[0308] A volume of 10 mL of Ochrobactrum haywardense HI suspension (OD₆₀₀ 0.5 to 1.0) or Agrobacterium suspension (OD₆₀₀ 0.5 to 1.0) in infection medium containing 200 mM acetosyringone is added to the EA. The embryonic axes are co-cultivated with the O. haywardense HI or Agrobacterium suspension containing PHP81356 (SEQ ID NO: 7). After co-cultivation, the base of each EA is embedded in shoot induction (SI) medium containing Spectinomycin 25-50 mg/L and 500 mg/L Cefotaxime. Shoot induction is carried out in a Percival Biological Incubator or growth room at 26° C. with a photoperiod of sixteen hours and a light intensity of 60-100 μl E/m²/s. After three to six weeks in selection medium, transformed spectinomycin-resistant shoots are produced from infected meristems of EA. The transformed shoots are cut and transferred to rooting medium for further shoot and root elongations. Using these methods, transgenic plantlets are recovered at a rate of 1-3% (relative to the number of starting explants infected with Ochrobactrum or Agrobacterium).

[0309] For hypocotyl transformation, surface sterilized cotton seeds are grown at 28° C. in the light for ten to fourteen days, and the hypocotyls are dissected away from the cotyledons. The hypocotyl is sliced into sections 3-5 mm long. Segments are transferred into 100×25 mm petri plates containing 12 ml of 20A medium with 100 mM acetosyringone. After slicing, 20 μl of Agrobacterium solution or Ochrobacturum solution (OD600 0.5 to 1.0) containing PHP81356 (SEQ ID NO: 7) is added to the plates, and the petri plates containing the hypocotyl/Agrobacterium or Ochrobacturum mixture are placed on a shaker platform and lightly agitated for ten minutes. After ten minutes of gentle agitation, the plates are moved into dim light and 21° C. for two to four days of co-cultivation. After co-cultivation, the hypocotyl explants are removed from the bacterial solution, and lightly blotted onto sterile filter paper before placing onto selection media (containing 10-20 mg/L spectinomycin) and moved to the light room (26° C. and bright light). After few rounds of selection, the explants are transferred to a shoot elongation media for two to three weeks and placed back into the light room. Shoots are then transferred onto a rooting media before being transferred to soil in the greenhouse. The green transgenic shoots are collected and transferred to greenhouse. Using these methods, transgenic plantlets are recovered at a rate of 1-3% (relative to the number of starting explants infected with Ochrobactrum or Agrobacterium).

### Example 22: Media

[0310] A wide range of tissue or explant types can be used in the current methods, including suspension cultures, immature cotyledons, mature cotyledons, split seed, embryonic axes, hypocotyls, embryos, and epicotyls. See Tables 10-18 for a description of the media formations for transformation, selection and regeneration referenced in the Examples.

TABLE 10

| | Units | | | | | | | | | |
|---|---|---|---|---|---|---|---|---|---|---|
| Medium components | per liter | 12R | 810K | 700A | 710I | 605B | 605J | 605T | 562V | 289Q |
| MS BASAL | G | | | 4.3 | 4.3 | 4.3 | 4.3 | 4.3 | | 4.3 |
| SALT | | | | | | | | | | |
| MIXTURE | | | | | | | | | | |
| N6 BASAL | G | | | | | | | | 4.0 | |
| SALTS | | | | | | | | | | |
| N6 | ml | | | | | 60.0 | 60.0 | 60.0 | | |
| MACRONUTRIENTS | | | | | | | | | | |
| 10X | | | | | | | | | | |
| POTASSIUM NITRATE | G | | | | | 1.7 | 1.7 | 1.7 | | |
| B5H | ml | | | | | 0.6 | 0.6 | 0.6 | | |
| MINOR | | | | | | | | | | |
| SALTS | | | | | | | | | | |
| 1000X | | | | | | | | | | |
| NaFe EDTA | ml | | | | | 6.0 | 6.0 | 6.0 | | |
| FORB5H | | | | | | | | | | |
| 100X | | | | | | | | | | |
| ERIKSSON'S | ml | | | | | 0.4 | 0.4 | 0.4 | 1.0 | |
| VITAMINS | | | | | | | | | | |
| 1000X | | | | | | | | | | |
| S&H | ml | | | | | 6.0 | 6.0 | 6.0 | | |
| VITAMIN | | | | | | | | | | |
| STOCK | | | | | | | | | | |
| 100X | | | | | | | | | | |
| THIAMINE•HCL | mg | | | 10.0 | 10.0 | 0.5 | 0.5 | 0.5 | 0.5 | |
| L-PROLINE | G | | | | 0.7 | 2.0 | 2.0 | 2.0 | 0.69 | 0.7 |
| CASEIN | G | | | | | 0.3 | 0.3 | 0.3 | | |
| HYDROLYSATE | | | | | | | | | | |
| (ACID) | | | | | | | | | | |
| SUCROSE | G | | | 68.5 | 20.0 | 20.0 | 20.0 | 20.0 | 30.0 | 60.0 |
| GLUCOSE | G | 5.0 | | 36.0 | 10.0 | 0.6 | 0.6 | 0.6 | | |
| MALTOSE | G | | | | | | | | | |
| 2,4-D | mg | | | 1.5 | 2.0 | 1.6 | 0.8 | 0.8 | 2.0 | |
| AGAR | G | 15.0 | | | 8.0 | 6.0 | 6.0 | 6.0 | 8.0 | 8.0 |
| BACTO- | G | | 15.0 | | | | | | | |
| AGAR | | | | | | | | | | |
| PHYTAGEL | G | | | | | | | | | |
| DICAMBA | g | | | | | 1.2 | 1.2 | 1.2 | | |
| SILVER | mg | | | | | 1.7 | 3.4 | 3.4 | 0.85 | |
| NITRATE | | | | | | | | | | |
| AGRIBIO | mg | | | | | 100.0 | 100.0 | | | |
| Carbenicillin | | | | | | | | | | |
| Timentin | mg | | | | | | | 150.0 | | 150.0 |
| Cefotaxime | mg | | | | | | | 100.0 | | 100.0 |
| Meropenem | mg | | | | | 50.0 | | | | |
| MYO- | g | | | 0.1 | 0.1 | | | | | 0.1 |
| INOSITOL | | | | | | | | | | |
| NICOTINIC | mg | | | 0.5 | 0.5 | | | | | |
| ACID | | | | | | | | | | |
| PYRIDOXINE•HCL | mg | | | 0.5 | 0.5 | | | | | |
| VITAMIN | g | | | 1.0 | | | | | | |
| ASSAY | | | | | | | | | | |
| CASAMINO | | | | | | | | | | |
| ACIDS | | | | | | | | | | |
| MES | g | | | | 0.5 | | | | | |
| BUFFER | | | | | | | | | | |
| ACETOSYRINGONE | uM | | | | 100.0 | | | | 100.0 | |
| ASCORBIC | mg | | | | 10.0 | | | | | |
| ACID | | | | | | | | | | |
| 10 MG/ML | | | | | | | | | | |
| (7S) | | | | | | | | | | |
| MS | ml | | | | | | | | | 5.0 |
| VITAMIN | | | | | | | | | | |
| STOCK | | | | | | | | | | |
| SOL. | | | | | | | | | | |
| ZEATIN | mg | | | | | | | | | 0.5 |
| CUPRIC | mg | | | | | | | | | 1.3 |
| SULFATE | | | | | | | | | | |
| IAA | ml | | | | | | | | | 2.0 |
| 0.5 MG/ML | | | | | | | | | | |
| (28A) | | | | | | | | | | |
| ABA 0.1 mm | ml | | | | | | | | | 1.0 |
| THIDIAZURON | mg | | | | | | | | | 0.1 |
| AGRIBIO | mg | | | | | | | | | 100.0 |
| Carbenicillin | | | | | | | | | | |
| PPT(GLUFOSINATE- | mg | | | | | | | | | |
| NH4) | | | | | | | | | | |
| BAP | mg | | | | | | | | | 1.0 |
| YEAST | g | | 5.0 | | | | | | | |
| EXTRACT | | | | | | | | | | |
| (BD Difco) | | | | | | | | | | |
| PEPTONE | g | | 10.0 | | | | | | | |
| SODIUM | g | | 5.0 | | | | | | | |
| CHLORIDE | | | | | | | | | | |
| SPECTINOMYCIN | mg | 50.0 | 50.0 | | | | | | | |
| FERROUS | ml | 2.0 | | | | | | | | |
| SULFATE•7H20 | | | | | | | | | | |
| AB BUFFER | ml | 50.0 | | | | | | | | |
| 20X (12D) | | | | | | | | | | |
| AB SALTS | ml | 50.0 | | | | | | | | |
| 20X (12E) | | | | | | | | | | |
| THYMIDINE | mg | 50.0 | 50.0 | 50.0 | | | | | 50.0 | |
| GENTAMYCIN | mg | 50.0 | 50.0 | | | | | | | |
| Benomyl | mg | | | | | | | | | |
| pH | | | 6.8 | 5.2 | 5.8 | 5.8 | 5.8 | 5.8 | 5.8 | 5.6 |

TABLE 11

| | Units | | | | | | | |
|---|---|---|---|---|---|---|---|---|
| Medium components | per liter | 289R | 13158H | 13224B | 13266K | 272X | 272V | 13158 |
| MS BASAL SALT | g | 4.3 | 4.3 | | 4.3 | 4.3 | 4.3 | 4.3 |
| MIXTURE | | | | | | | | |
| N6 | ml | | | 4.0 | 60.0 | | | |
| MACRONUTRIENTS | | | | | | | | |
| 10X | | | | | | | | |
| POTASSIUM | g | | | | 1.7 | | | |
| NITRATE | | | | | | | | |
| B5H MINOR SALTS | ml | | | | 0.6 | | | |
| 1000X | | | | | | | | |
| NaFe EDTA FOR B5H | ml | | | | 6.0 | | | |
| 100X | | | | | | | | |
| ERIKSSON'S | ml | | | 1.0 | 0.4 | | | |
| VITAMINS 1000X | | | | | | | | |
| S&H VITAMIN | ml | | | | 6.0 | | | |
| STOCK 100X | | | | | | | | |
| THIAMINE•HCL | mg | | | 0.5 | 0.5 | | | |
| L-PROLINE | g | 0.7 | 0.7 | 2.9 | 2.0 | | | |
| CASEIN | g | | | | 0.3 | | | |
| HYDROLYSATE | | | | | | | | |
| (ACID) | | | | | | | | |
| SUCROSE | g | 60.0 | 60.0 | 190.0 | 20.0 | 40.0 | 40.0 | 40.0 |
| GLUCOSE | g | | | | 0.6 | | | |
| MALTOSE | g | | | | | | | |
| 2,4-D | mg | | | | 1.6 | | | |
| AGAR | g | | 8.0 | 6.4 | 6.0 | 6.0 | 6.0 | 6.0 |
| PHYTAGEL | g | | | | | | | |
| DICAMBA | g | | | | 1.2 | | | |
| SILVER NITRATE | mg | | | 8.5 | 1.7 | | | |
| AGRIBIO Carbenicillin | mg | | | | 2.0 | | | |
| Timentin | mg | 150.0 | 150.0 | | | | | |
| Cefotaxime | mg | 100.0 | 100.0 | 25 | 25 | | | |
| MYO-INOSITOL | g | 0.1 | 0.1 | | | 0.1 | 0.1 | 0.1 |
| NICOTINIC ACID | mg | | | | | | | |
| PYRIDOXINE•HCL | mg | | | | | | | |
| VITAMIN ASSAY | g | | | | | | | |
| CASAMINO ACIDS | | | | | | | | |
| MES BUFFER | g | | | | | | | |
| ACETOSYRINGONE | uM | | | | | | | |
| ASCORBIC ACID | mg | | | | | | | |
| 10 MG/ML (7S) | | | | | | | | |
| MS VITAMIN STOCK | ml | 5.0 | 5.0 | | | 5.0 | 5.0 | 5.0 |
| SOL. | | | | | | | | |
| ZEATIN | mg | 0.5 | 0.5 | | | | | |
| CUPRIC SULFATE | mg | 1.3 | 1.3 | | | | | |
| IAA 0.5 MG/ML (28A) | ml | 2.0 | 2.0 | | | | | |
| ABA 0.1 mm | ml | 1.0 | 1.0 | | | | | |
| THIDIAZURON | mg | 0.1 | 0.1 | | | | | |
| AGRIBIO Carbenicillin | mg | | | | | | | |
| PPT(GLUFOSINATE- | mg | | | | | | | |
| NH4) | | | | | | | | |
| BAP | mg | | | | | | | |
| YEAST EXTRACT | g | | | | | | | |
| (BD Difco) | | | | | | | | |
| PEPTONE | g | | | | | | | |
| SODIUM CHLORIDE | g | | | | | | | |
| SPECTINOMYCIN | mg | | | | | | | |
| FERROUS | ml | | | | | | | |
| SULFATE•7H20 | | | | | | | | |
| AB BUFFER 20X | ml | | | | | | | |
| (12D) | | | | | | | | |
| AB SALTS 20X (12E) | ml | | | | | | | |
| Benomyl | mg | | | | | | | 100.0 |
| pH | | | | | | 0.5 | 5.6 | |

TABLE 12

| | Units | | | | | |
|---|---|---|---|---|---|---|
| Medium components | per liter | 20A | 70A | 70B | 70C | 90A |
| MS BASAL SALT | g | 4.3 | 4.3 | 4.3 | 4.3 | 4.3 |
| MIXTURE | | | | | | |
| THIAMINE•HCL | mg | 0.12 | 0.12 | 0.12 | 0.12 | 0.12 |
| SUCROSE | g | | 20 | 20 | 20 | |
| PVP40 | g | | 0.5 | 0.5 | 0.5 | |
| TC AGAR | g | | 5 | 5 | 5 | 5 |
| SILVER NITRATE | mg | | 2.0 | 2.0 | 2.0 | |
| AGRIBIO Carbenicillin | g | | 0.5 | 0.5 | 0.5 | |
| Adenine Hemisulfate Salt | mg | | 40 | 40 | 40 | |
| MYO-INOSITOL | g | 0.1 | 0.1 | 0.1 | 0.1 | |
| NICOTINIC ACID | mg | 0.57 | 0.57 | 0.57 | 0.57 | |
| PYRIDOXINE•HCL | mg | 0.57 | 0.57 | 0.57 | 0.57 | |
| Glycine | mg | 2.3 | 2.3 | 2.3 | 2.3 | |
| MES BUFFER | g | 0.5 | 0.5 | 0.5 | 0.5 | |
| ACETOSYRINGONE | uM | 200 | | | | |
| NAA | mg | 0.1 | 0.1 | 0.1 | 0.1 | |
| BAP | mg | 1.0 | 1.0 | 1.0 | 1.0 | |
| IBA | mg | | | | | 0.5 |
| Gibberellic Acid | ug | 10 | 10 | 10 | 10 | |
| SPECTINOMYCIN | mg | | 5 | 10 | 10 | |
| pH | | | 5.7 | 5.7 | 5.7 | 5.7 |

[0311] The compositions of various media used in soybean transformation, tissue culture and regeneration are outlined in Table 13. In this table, medium M1 is used for initiation of suspension cultures, if this is the starting material for transformation. Media M2 and M3 represent typical co-cultivation media useful for Agrobacterium transformation of the entire range of explants listed above. Medium M4 is useful for selection (with the appropriate selective agent), M5 is used for somatic embryo maturation, and medium M6 is used for germination to produce T0 plantlets. Additional media compositions for Agrobacterium-mediated transformation of dicot plants are disclosed in U.S. Pat. No. 8,962,328 incorporated herein by reference in its entirety.

TABLE 13

| Medium components | M1 | | M2 | | M3 | | M4 | | M5 | | M6 | | S30 | | M7 | | M8 | |
|---|---|---|---|---|---|---|---|---|---|---|---|---|---|---|---|---|---|---|
| MS salt with B5 | 4.44 | g/L | | | | | 4.4 | g/L | | | | | | | 4.44 | g/L | | |
| vitamins | | | | | | | | | | | | | | | | | | |
| (PhytoTech | | | | | | | | | | | | | | | | | | |
| M404) | | | | | | | | | | | | | | | | | | |
| Gamborg B-5 | | | | | | | | | | | 3.21 | g/L | | | | | 3.21 | g/L |
| basal medium | | | | | | | | | | | | | | | | | | |
| (PhytoTech | | | | | | | | | | | | | | | | | | |
| G398) | | | | | | | | | | | | | | | | | | |
| Modified MS | | | 2.68 | g/L | 2.68 | g/L | | | 2.68 | g/L | | | 2.68 | g/L | | | | |
| salt (PhytoTech | | | | | | | | | | | | | | | | | | |
| M571) | | | | | | | | | | | | | | | | | | |
| B5 vitamins | | | 1 | ml | 1 | ml | 1 | ml | 1 | ml | | | 1 | ml | | | | |
| (1000X) | | | | | | | | | | | | | | | | | | |
| (PhytoTech | | | | | | | | | | | | | | | | | | |
| G249) | | | | | | | | | | | | | | | | | | |
| 2,4-D stock 10 | 4 | ml | 1 | ml | 1 | ml | 4 | ml | 1 | ml | | | 1 | ml | | | | |
| mg/ml | | | | | | | | | | | | | | | | | | |
| KNO₃ | | | 1.64 | g/L | 1.64 | g/L | | | 1.64 | g/L | | | 0.93 | g/L | | | | |
| (NH₄)₂SO₄ | | | 0.463 | g/L | 0.463 | g/L | | | 0.463 | g/L | | | 0.463 | g/L | | | | |
| Asparagine | | | 1 | g/L | 1 | g/L | | | 1 | g/L | | | 1 | g/L | | | | |
| Glutamine | | | | | | | | | | | | | 4.48 | g/L | | | | |
| L-Methionine | | | | | | | | | | | | | 0.149 | g/L | | | | |
| Sucrose | | | 68.5 | g/L | 85.6 | g/L | | | 68.5 | g/L | 20 | g/L | 10 | g/L | | | 10 | g/L |
| Glucose | 31.5 | g/L | 36 | g/L | 49.6 | g/L | 31.5 | g/l | 36 | g/L | | | | | | | | |
| Maltose | | | | | | | | | | | | | | | 60 | g/L | | |
| MgCl₂•6H₂O | | | | | | | | | | | | | | | 0.75 | g/L | | |
| Activated | | | | | | | | | | | | | | | 5 | g/L | | |
| charcoal | | | | | | | | | | | | | | | | | | |
| (PhytoTech | | | | | | | | | | | | | | | | | | |
| C325) | | | | | | | | | | | | | | | | | | |
| Casein | | | 1 | g/L | 1 | g/L | | | 1 | g/L | | | | | | | | |
| hydrolysate | | | | | | | | | | | | | | | | | | |
| (PhytoTech | | | | | | | | | | | | | | | | | | |
| C184) | | | | | | | | | | | | | | | | | | |
| pH | 7.0 | | 5.4 | | 5.4 | | 7.0 | | 5.4 | | 5.7 | | 5.8 | | 5.7 | | 5.7 | |
| Acetosyringone | | | 300 | μM | 300 | μM | | | 200 | μM | | | | | | | | |
| DTT | | | | | | | | | 1 | mM | | | | | | | | |
| TC agar | 4 | g/L | | | | | | | | | 5 | g/L | | | | | 5 | g/L |
| Gelrite (Plant | | | | | | | 2 | g/l | | | | | | | 2 | g/L | | |
| Media Cat# | | | | | | | | | | | | | | | | | | |
| 714246) | | | | | | | | | | | | | | | | | | |

[0312] After 1-5 days of co-culture, the tissue is cultured on M3 medium with no selection for one week (recovery period), and then moved onto selection. For selection, an antibiotic or herbicide is added to M3 medium for the selection of stable transformants. To begin counter-selection against Agrobacterium, 300 mg/l Timentin® (sterile ticarcillin disodium mixed with clavulanate potassium, PlantMedia, Dublin, Ohio, USA) is also added, and both the selective agent and Timentin® are maintained in the medium throughout selection (up to a total 8 weeks). The selective media is replaced weekly. After 6-8 weeks on selective medium, transformed tissue becomes visible as green tissue against a background of bleached (or necrotic), less healthy tissue. These pieces of tissue are cultured for an additional 4-8 weeks.

[0313] Green and healthy somatic embryos are then transferred to M5 media containing 100 mg/L Timentin®. After a total of 4 weeks of maturation on M5 media, mature somatic embryos are placed in a sterile, empty Petri dish, sealed with Micropore™ tape (3M Health Care, St. Paul, Minn., USA) or placed in a plastic box (with no fiber tape) for 4-7 days at room temperature.

[0314] Desiccated embryos are planted in M6 media where they are left to germinate at 26° C. with an 18-hour photoperiod at 60-100 μl E/m²/s light intensity. After 4-6 weeks in germination media, the plantlets are transferred to moistened Jiffy-7 peat pellets (Jiffy Products Ltd, Shippagan, Canada), and kept enclosed in clear plastic tray boxes until acclimatized in a Percival incubator under the following conditions, a 16-hour photoperiod at 60-100 μE/m²/s, 26° C./24° C. day/night temperatures. Finally, hardened plantlets are potted in 2 gallon pots containing moistened SunGro 702 and grown to maturity, bearing seed, in a greenhouse.

[0315] Standard protocols for particle bombardment as disclosed by Finer and McMullen, 1991, In Vitro Cell Dev. Biol. —Plant 27:175-182, Agrobacterium-mediated transformation as disclosed by Jia et al., 2015, Int J. Mol. Sci. 16:18552-18543 and in US Patent Application No. 20170121722, incorporated herein by reference in its entirety, or Ochrobactrum-mediated transformation as disclosed in U.S. Patent Appln. No. 20180216123, incorporated herein by reference in its entirety, can be used with the methods of the disclosure. Standard protocols for plastid transromation as disclosed by Zora Svab, Peter Hajdukiewicz, and Pal Maliga (1990) Stable transformation of plastids in higher plants, Proc. Natl. Acad. Sci. 87:8526-8530) and in U.S. Pat. No. 5,877,402, incorporated herein by reference in their entireties.

TABLE 14
Media For Sorghum Transformation
Medium Composition

PHI-I: 4.3 g/l MS salts (Phytotechnology Laboratories, Shawnee Mission, KS, catalog
number M524), 0.5 mg/l nicotinic acid, 0.5 mg/l pyridoxine HCl, 1 mg/l thiamine HCl,
0.1 g/l myo-inositol, 1 g/l casamino acids (Becton Dickinson and Company, BD
Diagnostic Systems, Sparks, MD, catalog number 223050), 1.5 mg/l 2,4-
dichlorophenoxyacetic acid (2,4-D), 68.5 g/l sucrose, 36 g/l glucose, pH 5.2; with
100 μM acetosyringone added before using.
PHI-T: PHI-I with 20 g/l sucrose, 10 g/l glucose, 2 mg/l 2,4-D, no casamino acids,
0.5 g/l MES buffer, 0.7 g/l L-proline, 10 mg/l ascorbic acid, 100 μM acetosyringone,
8 g/l agar, pH 5.8.
PHI-U: PHI-T with 1.5 mg/l 2,4-D 100 mg/l carbenicillin, 30 g/l sucrose, no glucose
and acetosyringone; 5 mg/l PPT, pH 5.8.
PHI-UM: PHI-U with 12.5 g/l mannose and 5 g/l maltose, no sucrose, no PPT, pH 5.8
PHI-V: PHI-U with 10 mg/l PPT
DBC3: 4.3 g/l MS salts, 0.25 g/l myo-inositol, 1.0 g/l casein hydrolysate, 1.0 mg/l
thiamine HCL, 1.0 mg/l 2,4-D, 30 g/l maltose, 0.69 g/l L-proline, 1.22 mg/l cupric
sulfate, 0.5 mg/l BAP (6-benzylaminopurine), 3.5 g/l phytagel, pH 5.8
PHI-X: 4.3 g/l MS salts, 0.1 g/l myo-inositol, 5.0 ml MS vitamins stock^{b}, 0.5 mg/l
zeatin, 700 mg/l L-proline, 60 g/l sucrose, 1 mg/l indole-3-acetic acid, 0.1 μM abscisic
acid, 0.1 mg/l thidiazuron, 100 mg/l carbenicillin, 5 mg/l PPT, 8 g/l agar, pH 5.6.
PHI-XM: PHI-X with no PPT; added 1.25 mg/l cupric sulfate, pH 5.6.
PHI-Z: 2.15 g/l MS salts, 0.05 g/l myo-inositol, 2.5 ml MS vitamins stock^{a}, 20 g/l
sucrose, 3 g/l phytagel, pH 5.6
^{a}MS vitamins stock: 0.1 g/l nicotinic acid, 0.1 g/l pyridoxine HCl, 0.02 g/l thiamine HCl, 0.4 g/l glycine.

TABLE 15
Composition of wheat liquid infection medium WI 4
WI 4

| | | |
|---|---|---|
| DI water | 1000 | mL |
| MS salt + Vitamins(M519) | 4.43 | g |
| Maltose | 30 | g |
| Glucose | 10 | g |
| MES | 1.95 | g |
| 2,4-D (.5 mg/L) | 1 | ml |
| Picloram (10 mg/ml) | 200 | μl |
| BAP (1 mg/L) | .5 | ml |

Adjust PH to 5.8 with KOH
Post sterilization add:

| | | |
|---|---|---|
| Acetosyringone (400 μM) | 400 | μl |

TABLE 16

| | Units | |
|---|---|---|
| Medium components | per liter | 13152C |
| MS BASAL SALT MIXTURE | g | 4.3 |
| THIAMINE•HCL | mg | 1.0 |
| L-PROLINE | G | 0.7 |
| CASEIN HYDROLYSATE (ACID) | g | 1.0 |
| MALTOSE | g | 30.0 |
| 2,4-D | mg | 1.0 |
| PHYTAGEL | g | 3.5 |
| MYO-INOSITOL | g | 0.25 |
| CUPRIC SULFATE (100 mM) | ml | 1.22 |
| AGRIBIO Carbenicillin | mg | 100 |
| BAP (1 mg/ml) | mg | 0.5 |
| pH | | 5.8 |

TABLE 17
Media For Soybean Transformation

| | | Shoot | | |
|---|---|---|---|---|
| Medium components | Infection | Induction (SI) | Rooting | |
| Gamborg B5 Basal Medium (g/L) | 0.321 | 3.21 | — | |
| (Phytotech G398*) | | | | |
| MS Modified Basal Medium with | — | — | 2.22 | |
| Gamborg Vitamins (g/L) (Phytotech | | | | |
| M404*) | | | | |
| Phytotech R7100* | | 4.05 | | |
| Sucrose (g/L) (Phytotech S391*) | 30 | 30 | 20 | |
| MES (g/L) | 4.26 | | 0.64 | |
| pH | 5.4 | 5.6 to 5.7 | 5.6 | |
| TC agar (g/L) (Phytotech A175*) | — | 6 | 6 | |
| IBA | — | — | 1 | mg/L |

| GA3 (Phytotech G358*) | 0.25 | mg/L | — | | — |
|---|---|---|---|---|---|
| Zeatin-Riboside | — | | — | | — |
| BAP (Sigma B3274) stock 1 mg/ml | 1.67 | mg/L | 1.11 | mg/L | — |

| | | | | |
|---|---|---|---|---|
| Dithiothrietol (DTT, Phytotech | 1 | ml/L | — | — |
| D259*, stock 1M, final 1 mM) | | | | |
| Acetosyringone (Aldrich D13, 440-6) | 0.2 | ml/L | — | — |
| stock 1M | | | | |
| (final 200 μM) | | | | |

| | | | | | |
|---|---|---|---|---|---|
| Cefotaxime (GoldBio 64485-93-4, | — | 300 | mg/L | 300 | mg/L |
| 94.2%, stock 150 mg/ml) | | | | | |
| Spectinomycin (PhytoTech S742*, | | 0.25 | ml/L | 0.1 | ml/L |
| stock 100 mg/ml) | | | | | |

*PhytoTechnology Laboratories, P.O. Box 12205; Shawnee Mission, KS 66282-2205

TABLE 18
Media For Cowpea Transformation

Infection Medium: MS salts and vitamins, 20 mM MES buffer, 30 g/l sucrose, 0.5 mg/l BAP,
0.5 mg/l kinetin, 0.25 mg/l GA3, 200 mM acetosyringone, 400 mg/l cycteine, 100 mM BCDA
(Bathocuproinedisulfonic acid disodium salt), 50 mg/l thymidine, 1 mg/l polyvinylpyrrolidone,
pH 5.4.
Co-cultivation medium: MS salts and vitamins, 20 mM MES buffer, 30 g/l sucrose, 0.5 mg/l
BAP, 0.5 mg/l kinetin, 0.25 mg/l GA3, 200 mM acetosyringone, 0.5 mM dithiothreitol, 400
mg/l cycteine, 100 mM BCDA (Bathocuproinedisulfonic acid disodium salt), 50 mg/l
thymidine, 1 mg/l polyvinylpyrrolidone, 8 g/l Difco Agar, pH 5.4.
Shoot Initiation Medium: MS salts and vitamins, 3 mM MES buffer, 30 g/l sucrose, 0.5 mg/l
BAP, 0.5 mg/l kinetin, 25 mg/l spectinomycin, 100 mg/l carbenicillin, 2 mg/l silver nitrate, 1
mg/l polyvinylpyrrolidone, 8 g/l Difco Agar, pH 5.6.
Shoot Elongation Medium: MS salts and vitamins, 3 mM MES buffer, 30 g/l sucrose, 0.1 mg/l
kinetin, 0.5 mg/l GA3, 50 mg/l asparagine, 25 mg/l spectinomycin, pH 5.6.
Rooting Medium: MS salts and vitamins, 3 mM MES buffer, 30 g/l sucrose, 0.1 mg/l IBA, 1
mg/l polyvinylpyrrolidone, 2 mg/l silver nitrate, 25 mg/l spectinomycin, pH 5.6.

### Example 23: Sequence Identification

[0316] Various sequences are referenced in the disclosure. Sequence identifiers are provided in Table 1 and in Table 19.

TABLE 19

| SEQ | | | |
|---|---|---|---|
| ID | | | |
| NO: | TYPE* | NAME | DESCRIPTION |
| 1 | DNA | PHP71539 | Synthetic construct containing Agrobacterium tumelaciens VIR genes |
| 2 | DNA | PHP89401 | Synthetic construct comprising the T-DNA (RB to LB): RB +LOXP |
| | | | + CCDB + GM-UBQ PRO-V1::GM-UBQ 5′ UTR::GM-UBQ |
| | | | INTRON1::CTP::SPCN::UBQ14 TERM + GM-EF1A2 PRO::GM- |
| | | | EF1A2 5′ UTR::GM-EF1A2 INTRON1::GM-EF1A2 5′ UTR::DS- |
| | | | RED2::UBQ3 TERM +LB |
| 3 | DNA | PHP91619 | Synthetic construct comprising: PRO::UBIlZM 5′ UTR::UBIlZM |
| | | | INTRON1:FRT1:CTP::SPCN::SB-UBI TERM |
| 4 | DNA | PHP75799 | Synthetic construct comprising: ZM-PLTP PRO::ZM-PLTP 5′ |
| | | | UTR::ZM-ODP2::OS-T28 TERM |
| 5 | DNA | PHP76976 | Synthetic construct comprising: ZM-AXIG1 PRO::ZM-WUS2::IN2- |
| | | | 1 TERM |
| 6 | DNA | PHP88871 | Synthetic construct comprising the T-DNA (RB to LB): RB + |
| | | | CAMV35S PRO (PHI)-V5::HA-WUS-V1::OS-T28 TERM (MOD1) |
| | | | + GM-UBQ PRO::GM-UBQ 5′ UTR::GM-UBQ INTRON1::ZS- |
| | | | YELLOW1 N1::NOS TERM + AT-UBIQ10 PRO::AT-UBIQ10 5′ |
| | | | UTR::AT-UBIQ10 INTRON1::CTP::SPCN::UBQ14 TERM + LB |
| 7 | DNA | PHP81356 | Synthetic construct comprising the T-DNA (RB to LB): RB + |
| | | | UBQ14 TERM::SPCN::CTP::AT-UBIQ10 INTRON1::AT-UBIQ10 |
| | | | 5′ UTR::AT-UBIQ10 PRO + UBQ3 TERM::TAGRFP::GM-UBQ |
| | | | INTRON1::GM-UBQ 5′ UTR::GM-UBQ PRO-V1 + LB |
| 8 | DNA | PHP82314 | Synthetic construct comprising the T-DNA (RB to LB): RB + GM- |
| | | | UBQ PRO-V1::GM-UBQ 5′ UTR::GM-UBQ |
| | | | INTRON1::TAGRFP::UBQ3 TERM + AT-UBIQ10 PRO:: AT- |
| | | | UBIQ10 5′ UTR::AT-UBIQ10 INTRON1::CTP::SPCN::UBQ14 |
| | | | TERM + LB |
| 9 | DNA | SPCN | Streptomyces spectabilis SPCN coding sequence |
| 10 | PRT | SPCN | Streptomyces spectabilis SPCN protein sequence |
| 11 | DNA | SPCN | Maize-codon-optimized Streptomyces spectabilis SPCN coding |
| | | (MO1) | sequence |
| 12 | PRT | SPCN | Maize-codon-optimized Streptomyces spectabilis SPCN protein |
| | | (MO1) | sequence |
| 13 | DNA | SPCN | Soybean-codon-optimized SPCN coding sequence |
| | | (SO) | |
| 14 | PRT | SPCN | Soybean-codon-optimized SPCN protein sequence |
| | | (SO) | |
| 15 | DNA | LP-APH | Legionella pheumophila APH coding sequence |
| 16 | PRT | LP-APH | Legionella pheumophila APH protein sequence |
| 17 | DNA | PHP0004 | Synthetic construct comprising: FRT1:PMI:: PINII TERM + |
| | | | UBIlZM PRO::DS- RED2::PINII TERM + FRT87 |
| 18 | DNA | PHP5096 | Synthetic construct comprising: UBIlZM PRO::FLPm::PINII |
| | | | TERM |
| 19 | DNA | PHP89030 | Synthetic construct comprising: ZM-PLTP PRO::ZM-ODP2::0S- |
| | | | T28 TERM + FMV & PCSV ENHANCERS |
| 20 | DNA | PHP89179 | Synthetic construct comprising: ZM-PLTP PRO::ZM-WUS2::IN2-1 |
| | | | TERM |
| 21 | DNA | LP-APH | Maize-codon-optimized LP-APH coding sequence |
| | | (MO1) | |
| 22 | PRT | LP-APH | LP-APH (MO1) encoded protein sequence |
| | | (MO1) | |
| 23 | DNA | LP-APH | Soybean-codon-optimized LP-APH coding sequence |
| | | (SO) | |
| 24 | PRT | LP-APH | LP-APH (SO) encoded protein sequence |
| | | (SO) | |
| 25 | DNA | PHP86170 | Synthetic construct comprising the T-DNA (RB to LB): RB- |
| | | | GMUBQ PRO::GM-UBQ 5UTR::GM-UBQ |
| | | | INTRON1::CTP:SPCN::PINII TERM +DMMV |
| | | | PRO::TAGRFP::UBQ14 TERM + LB |
| 26 | DNA | PHP82311 | Synthetic construct comprising the T-DNA (RB to LB): RB + GM- |
| | | | UBQ PRO-V1::GM-UBQ 5′ UTR::GM-UBQ |
| | | | INTRON1::TAGRFP::UBQ3 TERM + GM-SAMS PRO:: GM- |
| | | | SAMS 5′ UTR:: GM-SAMS INTRON1::CTP::APH::UBQ14 TERM |
| | | | + LB |
| 27 | DNA | PHP82312 | Synthetic construct comprising the T-DNA (RB to LB): RB + GM- |
| | | | UBQ PRO-V1::GM-UBQ 5′ UTR::GM-UBQ |
| | | | INTRON1::TAGRFP::UBQ3 TERM + AT-UBIQ10 PRO:: AT- |
| | | | UBIQ10 5′ UTR:: AT-UBIQ10 INTRON1::CTP::APH::UBQ14 |
| | | | TERM + LB |
| 28 | DNA | PHP82313 | Synthetic construct comprising the T-DNA (RB to LB): RB + GM- |
| | | | UBQ PRO-V1::GM-UBQ 5′ UTR::GM-UBQ |
| | | | INTRON1::TAGRFP::UBQ3 TERM + GM-SAMS PRO:: GM- |
| | | | SAMS 5′ UTR:: GM-SAMS INTRON1::CTP::SPCN::UBQ14 |
| | | | TERM + LB |
| 29 | DNA | PHP81355 | Synthetic construct comprising the T-DNA (RB to LB): RB + |
| | | | UBQ14 TERM::SPCN::CTP::GM-SAMS INTRON1::GM-SAMS 5′ |
| | | | UTR::GM-SAMS PRO + UBQ3 TERM::TAGRFP::GM-UBQ |
| | | | INTRON1::GM-UBQ 5′ UTR::GM-UBQ PRO-V1 + LB |
| 30 | DNA | PHP81354 | Synthetic construct comprising the T-DNA (RB to LB): RB + |
| | | | UBQ14 TERM::APH::CTP::GM-SAMS INTRON1::GM-SAMS 5′ |
| | | | UTR::GM-SAMS PRO + UBQ3 TERM::TAGRFP::GM-UBQ |
| | | | INTRON1::GM-UBQ 5′ UTR::GM-UBQ PRO-V1 + LB |
| 31 | DNA | PHP81359 | Synthetic construct comprising the T-DNA (RB to LB): RB + |
| | | | UBQ14 TERM::APH::CTP:: AT-UBIQ 10 INTRON1:: AT-UBIQ10 |
| | | | 5′ UTR:: AT-UBIQ10 PRO + UBQ3 TERM::TAGRFP::GM-UBQ |
| | | | INTRON1::GM-UBQ 5′ UTR::GM-UBQ PRO-V1 + LB |
| 32 | DNA | PHP92307 | Synthetic construct comprising the T-DNA (RB to LB): RB + LOXP |
| | | | + PLTP:WUS:IN2-1 TERM +ZMHSP17.7:MO-CRE:PINII TERM |
| | | | + UBIlZMPRO:NPTII:SB-UBI TERM + UBIlZM PRO-FRT1 |
| | | | FRT1:CTP::SPCN::SB-UBI TERM + LB) |
| 33 | DNA | PHP1 | Synthetic construct comprising the T-DNA (RB to LB): RB+30LoxP- |
| | | | NOS:WUS:PINII+ZMUBI:ODP2:PINIFRAB17:MOCRE:PINII+ |
| | | | ZMUBI-CTP-SPCN:SB-UBITERM+LB |
| 34 | DNA | PHP2 | Synthetic construct comprising the T-DNA (RB to LB): RB+LoxP- |
| | | | NOS:WUS:PINII+ZMUBI:ODP2:PINIFRAB17:MOCRE:PINII+LB |
| 35 | DNA | PHP3 | Synthetic construct comprising: FRT1:CTP::SPCN::PINII |
| | | | TERM:FRT87 |
| 36 | DNA | PHP4 | Synthetic construct comprising the T-DNA (RB to LB): RB+UBI |
| | | | PRO:UBIlZM INTRON::MO-FLP::PINII TERM+CaMV35S |
| | | | TERM+FRT1:CTP::SPCN::PINII TERM:FRT87+UBI |
| | | | PRO::UBIlZM INTRON::DsRED+30NOS PRO::ZM-WUS2::PINII |
| | | | TERM+UBI PRO:UBIlZM INTRON::ZM-ODP2:: PINII |
| | | | TERM+LB |
| 37 | DNA | PHP49452 | Synthetic construct comprising the T-DNA (RB to LB): RB+GM- |
| | | | SAMS PRO-GM-SAMS UTR-GM SATMS INTRON1-GM-SAMS |
| | | | UTR2-FRT1:CAMV35S PRO:HYG:NOS TERM + GM-UBQ PRO- |
| | | | GM-UBQ 5UTR:ZS-YELLOW:NOS TERM-FRT:87+LB |
| 38 | DNA | PHP92521 | Synthetic construct comprising the T-DNA (RB to LB): RB+AT- |
| | | | UBIQ10 PRO:FLP:UBQ3TERM+FRT1-CTP-SPCN:UBQ10 |
| | | | TERM++GM-MYH11:DS-RED:PINII-FRT87+LB |
| 39 | DNA | PHP92985 | Synthetic construct comprising the T-DNA (RB to LB): RB+GM- |
| | | | EF1A2PRO:FLP:UBQ10 TERM+FRT1-CTP-SPCN:UBQ3 |
| | | | TERM++GM-MYH11PRO:DS-RED:PINII-FRT87+LB |
| 40 | DNA | PHP93448 | Synthetic construct comprising the T-DNA (RB to LB): |
| | | | RB+GMEF1A2 PRO:FLP:UBQ3 TERM+FRT1-CTP-SPCN:UBQ10 |
| | | | TERM+FMVENH+PCSV EHN+MMV ENH+GM-MTH1:DS- |
| | | | RED:PINII-FRT87+LB |
| 41 | DNA | PHP92349 | Synthetic construct comprising the T-DNA (RB to LB): |
| | | | RB+LOXP+GM-QBU PRO::CTP:SPCN::UBQ14 TERM+GM- |
| | | | EF1A2 PRO::DS-RED2::UBQ3 TERM+LOXP+LB |
| 42 | DNA | PHP81184 | Synthetic construct containing Agrobacterium rhizogenes VIR genes |
| 43 | DNA | PHP70298 | Synthetic construct containing Agrobacterium tumefaciens VIR genes |
| 44 | DNA | PHP79761 | Synthetic construct containing Agrobacterium tumefaciens VIR genes |
| 45 | DNA | FRT | GAAGTTCCTATTCTCTAGAAAGTATAGGAACTTC |

* “DNA” indicates a polynucleotide or nucleic acid sequence;
“PRT” indicates a polypeptide or protein sequence.

[0317] As used herein the singular forms “a”, “an”, and “the” include plural referents unless the context clearly dictates otherwise. Thus, for example, reference to “a cell” includes a plurality of such cells and reference to “the protein” includes reference to one or more proteins and equivalents thereof known to those skilled in the art, and so forth. All technical and scientific terms used herein have the same meaning as commonly understood to one of ordinary skill in the art to which this disclosure belongs unless clearly indicated otherwise.

[0318] All patents, publications and patent applications mentioned in the specification are indicative of the level of those skilled in the art to which this disclosure pertains. All patents, publications and patent applications are herein incorporated by reference in the entirety to the same extent as if each individual patent, publication or patent application was specifically and individually indicated to be incorporated by reference in its entirety.

[0319] Although the foregoing disclosure has been described in some detail by way of illustration and example for purposes of clarity of understanding, certain changes and modifications may be practiced within the scope of the appended claims.

The application's sequence listing, which the Patent Office published only in electronic form, follows.

SEQUENCE LISTING (115 sequences)

SEQ ID NO: 1 - DNA, 28390 bp, Artificial
  Synthetic construct containing the Agrobacterium tumefaciens VIR genes
gacccgcgaggtttctcgcttcaattgaaatcataaagaagcaattgaaaattttcgagtaaccgaccctcccgataatcttcaacataaaacaacgcacttcttccaacgggagaggcggtgttagttgcgagctaaggagataaggtatgcttaagagatcggggtcgctttctcttgccttgatggtctccttctgttcgtcgagccttgccacgccactctcatctgctgagtttgaccatgttgctcgcaagtgtgccccatcagttgcgacatctacgcttgcggcgatagctaaggtggagagtcgctttgatcctttagcgattcatgacaacacgaccggcgaaacgcttcactggcaagatcacagccaagcaacccaagtcgtcaggcaccgtctcgatgcacggcattcgctggatgttggcctcatgcaaataaactctcgaaatttttctatgctcggtctgacacctgacggtgcgctccaggcgtgcacatcattatctgccgctgcaaacatgctgaaaagtcgttatgcaggcggcgaaacgattgacgagaagcaatttgcgcttcgtcgggcgatctccgcttacaacaccggtaatttcatcggcggttttgcaaacggctacgtgcgaaaagttgaaacagctgctcaatcgctggtgcccgcgttaatcgagcctccaaaagacgatcacgaggcgctaaaatccgaagagacgtgggatgtttgggggtcatatcagcgccgctcgcaggaggatggcgctggcggtttaatcgctccgccaccgccacaccaggacaacggcaaatccgcagacgacaatcaagtcttattcgacttatactaaggaggtgcgcattgatgcgatgctttgagagataccgtttacatctaaatcgcctctcgctctcgaatgcgatgatgcgcgtgatatcgagctgcgccccaagcttgtgcggtgcaattgcatggagcatttcctcatccggacccgccgcagcgcaatctgcgggtggcggcactgaccccgccacaatggttaacaatatatgcacgtttatccttggtccgttcggccagtcactcgctgttctcggcattgtcgctatcgggatctcctggatgttcgggcgggcttcgcttgggctggttgccggcgtcgtcggcggcattgttatcatgtttggggcgagcttcctcggccaaacgctcactggcggtagttgatggctgatcgtttggaagaatcgaccctttacctcgcagccacacggcccgcattgtttcttggggtgccactgacattggcagggttattcatgatgttcgccggctttgtcatcgttatcgttcagaacccgctctacgaagtcgttctcgtgccgttatggtttgcagcccggctcatcgtggagcgagactacaatgcggcgagcgtcgtcctgctatttttgcggaccgcgggaagaagcattgatagtgcagtttgggggggcgctactgttagcccaaatccaattagggttcccccacgagggagaggaatggtgtgatgctcggcgcgagtggaacgaccgaaagatccggtgagatctatctcccttatattggccacctcagcgaccatatcgtccttcttgaagacggatcgatcatgaccattgcgagaattgatggcgttgcattcgagcttgaggaaactgaaatgcgcaatgcgcgttgtcgtgcgttcaacacgctgttgcgcaatatcgctgatgatcatgtgtcaatatatgctcacctcgtacgtcatgccgacgtgccatcatcggcgccgcgacacttccgtagtgttttcgccgctagcctgaacgaagcttttgaacagcgcgtgctctccggccaactcctccgcaatgaacacttccttacgttgattgtctacccacaggcggctttagggaaggtaaagaggaggttcaccaagctaagcggaaaaagggaaaacgatctcacgggccagatcaggaacatggaagatctttggcatgttgtcgctggctctcttaaagcgtatggcctgcatcgtcttggcatccgcgagaagcagggtgtgctcttcaccgaaattggcgaagcgctacggttgatcatgactggtcggttcacaccggttccggtcgtcagcggctcactcggcgcttcgatttataccgacagagtcatttgcggcaagcgaggactcgagatcagaacgccaaaagacagttacgttggatccatctattcgtttcgcgaataccctgcaaaaacacggccgggcatgctcaacgcgctgctatccctcgattttccacttgttctcacgcagagtttttcgttcctgactcgcccgcaagcgcacgcgaaacttagcctcaaatcgagccagatgctgagttccggcgataaagccgtgactcaaatcggcaaattatccgaggctgaggacgcacttgcgagcaacgaattcgttatgggctcacatcatttgagcctttgcgtctatgcagacgatctcaatagtcttggggacaggggcgcgcgggctcggacacgaatggcggatgcaggtgccgtggttgtccaagaaggtattggtatggaagcggcctattggtcccaattgccggggaattttaagtggcgcacacgccctggcgcaatcacttcacgcaatttcgcagggtttgtctctttcgaaaactttccagagggcgccagctcaggccactggggcaacgcgattgcccgatttcgtaccaatggcggaacgcctttcgactatatcccgcatgagcacgatgttggcatgacggcaatattcgggcctatcgggaggggtaagacgacgctcatgatgtttgttctagccatgctcgaacagagcatggtcgaccgtgcaggtacggtcgtgttctttgacaaggaccggggtggcgaattgctggttcgcgccacaggaggaacatatttggcacttcacagaggcacacccagcgggttggcgccgttgcgtggcctagaaaacacagcagcctcacacgattttctgcgcgaatggatcgtggctctcatcgagagtgatggtcggggtgggatttctccggaagagaaccgccgtctggtccgtggtatccatcgtcagctctcgtttgatccacaaatgcgttcaatcgcggggttacgtgaatttttgttgcatgggcccgccgaaggcgcaggagcgcggctccaacgctggtgccggggccatgcgcttggctgggcatttgacggcgaagttgacgaagtaaagttagatccgtcgattaccggcttcgacatgacgcatcttctcgaatacgaggaagtatgcgctcccgctgcagcatatctcctgcatcggattggagccatgatcgacggccgccgttttgtgatgagctgcgatgagtttcgcgcctatttgttaaaccctaaattttcgactgtcgtcgacaaattcctcctgaccgttcgaaaaaacaacgggatgctaatactggcaacgcagcaaccagagcatgttctggaatcgccgctaggagccagcttggttgcgcaatgtatgacgaagattttctatccatcaccaaccgcagatcgatcggcttatgtcgatggactgaaatgtaccgaaaaggaatttcaggcgatccgtgaagacatgacggtcggcagccgtaagtttcttcttaaacgagaaagtggaagcgtcatctgcgaatttgatctgcgggatatgcgtgaatatgtcgccgtgctttcggggcgtgccaacacggtgcgctttgcaactcgactacgcgaggcacaagaaggcaactcatctggctggctcagcgaattcatggcccgtcaccacgaggcagaagattgataaggtaggaaacgatgaagacgacgcaacttattgcaacagttttgacctgcagctttctatatattcagcccgcgcgggcgcagtttgttgttagcgacccggcaacggaggctgagacgctcgcgactgcgctcgcgactgcggagaatctcactcagactatagcgatggttacgatgttgacgtcggcctacggcgttactggactactgacttcgctcaaccagaaaaatcagtatccttcgacgaaggacctagacaatgaaatgttttcgccgcgaatgccaatgtcgaccacggcacgtgcgatcaccagcgatacagatcgtgcagtcgtgggtagtgatgctgaagcggacctgttgcgatcgcagatcaccggttccgcaaacagcgctggcattgcggctgacaatctggaaacgatggacaaacgcttgacggcgaatgctgatacgtctgctcagctttcccgatctcgcaatatcatgcaggcaaccgtgaccaatggtttgcttctcaagcagatccatgacgcaatgattcaaaatgtacaggcgacaagcctattaacgatgactaccgcgcaggccggccttcacgaggcggaagaggcggccgctcaacgcaaggagcatcaaaagaccgctgtcatctttggtgccctcccctaaggctgggcgatttgttcatccgcccgcatcctcgccgaatgcgagctcattttatccaacattatgcgacaaaccagtcaagttcaggtccaatcgatgaatttcacgattccggcgccgtttacggccattcatacgatcttcgatgtagccttcacgacaggcttggactcgatgcttgagactatccaggaggcggtgagtgcgccattgatcgcctgtgtcactctttggattattgttcagggtattttagtcatacgcggcgaagtcgatacccgtagcggtatcactcgggtgatcacggtcaccatcgttgttgctctaattgttgggcaggctaactaccaagactatgtggtttccatcttcgaaaagacggtcccaaactttgttcagcagtttagtgtaaccggcttgcctctgcagactgttccggcacagttggatacaatgttcgccgtgacccaggccgtttttcagaaaatcgcatccgaaatcggtccgatgaacgaccaggacatccttgctttccaaggggcacagtgggtcctttacggcacgctctggtctgccttcggagtttacgacgccgttggaattctcacgaaagtgcttctcgcgatcgggcctctgatcctcgtcggatatatttttgatcgcacgcgggacatcgcagctaagtggatcgggcaacttatcacctacggtctcttgcttctcctcttaaacctcgtggcaacgatcgtcatcctaaccgaagcgactgcgctcacccttatgcttggtgtaatcaccttcgccggtacgaccgcggccaagatcattggtctttacgaactcgatatgttttttctgacaggggatgcgctcattgtcgctttgccggcgatcgccggcaacattggaggcagttactggagcggcgcaacccaatctgccagcagcttgtaccgtcgcttcgctcaggttgagcgaggctaggtcgcgcaaaaattcgcctcaatggagaattctatgaagtattgcctgctgtgcctagttgtcgctttgagcggctgccagacaaacgacacattagcgagctgcaaaggcccgatcttcccgctgaatgtggggcgatggcagcctactccgtcagatcttcagctcggcaattcgggtggacgctatgacggggcctgaatatgccatgctagtggcgcgcgaaagccttgccgagcactataaggaagtagaagcctttcaaaccgcgcgagcgaaatcggcgcgacgtctctccaaactcattgcagctgtcgcagctatcgcgattttgggaaatgttgctcaagcgttcgctatagccacaatggtgccgttgagcaggcttgtgcccgtatatctatggatacggccggacggcaccgttgacagcgaggtgtctgtctcgcgattgcctgcaactcaagaggaggccgtcgttaacgcctcattgtgggagtacgttcgcctgcgcgagagttatgatgccgacaccgctcagtacgcctacgacctggtatcgaacttcagtgccccaacagtgcgccaggattaccagcaattcttcaactatcccaatcccagttcgcctcaagtcattcttggcaaacgcggcagggtggaggtcgagcacatcgcttcaaatgatgtaactccaagcacgcagcaaattcgctataaaaggaccctcgtcgttgacggcaaaatgcctgtggtgagtacgtggaccgcgacagttcgctacgaaaaggtgaccagcttgcccggcagattgagactaaccaacccggcaggtctggttgtcacctcctatcagacatcggaagataccgtttcaaacgtaggccacagcgaaccatgatcagaaaagcacttttcattttagcatgtttatttgccgctgcgactggtgcggaggctgaagacactccaatggcgggcaagctagatccgcgcatgcgttatttggcttacaatcccgatcaagtggtgcgcctctcgacggcggttggagctactttggtcgtaacattcgccacgaacgaaacggtgacagcggttgccgtttcaaatagcaaagatctagcagccctaccgcggggaaattatctatttttcaaggcaagccaggtcctcacgcctcagccagtaatcgtgctaaccgcaagcgactccgggatgcgccgttatgttttcagtataagttccaagactctgtcccacctcgataaagagcagcccgatctctattacagcgtccaattcgcctaccccgccgacgatgcggcggctcggcgaagggaggcacaacagaaggctgttgtggacagactacacgcggaagcacaatatcaacggaaagctgagaatttattggatcagcctgtcacagcccttggtgcggcggacagtaattggcactacgtcgcccaaggcgatcgttcgctgttgccactcgaagtcttcgacaatggatttacgacggtattccactttccgggcaatgtacgcataccctccatctacaccatcaatcctgatggcaaggaagctgttgccaactattcagttaaagggagcgatgtcgagatttcttcggtttcccgaggttggcgtctgagggatggccacacagtactatgtatctggaacaccgcttacgatcccgttggccaaaggccgcaaacgggcacggtgaggcccgatgtgaaacgcgtcctgaagggggcgaagggatgaataacgatagtcagcaagcggcacatgaggttgatgcatctggatccctggtctccgacaaacatcgccggcgtctttcggggtctcagaaattgatcgtcggaggtgtcgttctcgcgttatcattaagcctcatttggctaggtgggcgccaaaagaaggtgaatgagaacgcatcgccgtcaactttgatcgcaacaaacaccaagccatttcatccagctccgattgaggtgccgccggatcctccagcggttcaagaggctgttcagcctgctgctcctctaccgccgaggggcgaaccggagcggcatgagccacggccggaagaaacaccgatttttgcatatagcagcggcgatcaaggggtcagcaaacgcgccattcagggcgacacgggccgaagacaagaaggcaagcgtgacgacaactccttgccgaatggcgaagtgtccggcgagaacgatttgtcgatacgtatgaaacccaccgagctgcagcccagcagcgccacgctcttgccgcaccccgattttatggtaacgcaagggacaataattccgtgcatcttgcaaaccgcaatcgacacaaatttggcaggctatgtaaagtgtgtcttgcctcaggatattcgtggaacaacgaacaatatcgtgcttcttgatcgtggcaccaccgttgttggcgaaatacagcgtggcttgcaacagggagatgggcgcgtttttgtgttgtgggatcgcgccgagacacctgaccatgcgatgatctcgttaacatcgccaagcgcggacgaactcggtcgctcaggattgccgggctcggtcgacagccacttctggcagcgttttagcggagctatgctcttgagtgttgttcaaggcgccttccaggcagctagcacctacgccggcagctcgggtggcgggatgagcttcaacagctttcaaaataacggtgagcagacaactgagacagcccttaaggcaaccatcaacataccgccaaccctgaagaagaatcagggtgacaccgtttccattttcgtagcacgggacctcgatttctttggtgtttaccagctccgcctgactggcggcgccacgcgggggaggaaccgccgctcttaatgaattcaaatttccgcttagagataggatacattgtaaatggaagtggatccgcaactacgctttcttctgaagccgattttggaatggctcgatgacccgaagactgaagaaattgcgatcaatcgacctggagaggcatttgtgcgccaagccggcatttttaccaagatgcctttgcccgtctcttatgatgatcttgaagatatcgctattttagcgggcgcgctgagaaagcaggatgtcggaccacgtaaccccctctgcgccactgaacttcctggtggtgaacgactacaaatctgtctgccgccgaccgttccctcgggcaccgtcagcttgaccattcgacggccaagctcgcgtgtttctggtcttaaagaagtctcctcccgttatgatgcttcgaggtggaaccagtggcagacacgaaggaaacgccaaaatcaggatgatgaagctatccttcagcattttgacaacggggatttggaagcgtttctgcacgcatgcgtcgtcagccgactgacgatgttgctatgtggccctaccggaagcggcaagacaacaatgagcaagaccttgatcagcgccatccccccccaggaaaggctaatcaccatagaagatacgctcgaactcgtcattccacacgataatcatgttagactactctactccaagaacggtgctgggctgggtgctgtgagcgccgagcacttgctccaagcaagtctgcgtatgcggccggaccggatattgcttggcgagatgcgcgacgatgcagcatgggcttatctgagtgaagtcgtctcgggacatccgggatcgatttcaacaatacacggcgcgaatccaatccaaggattcaagaaactgttttcccttgtcaaaagtagcgcccaaggtgctagcttggaagatcgcacactgattgacatgctctctacggcgatcgatgtcatcattccattccgtgcctatgaggacgtttatgaagtaggcgagatctggctcgcggcggacgcacgacgccggggcgagaccataggcgatctccttaatcaatagtagctgtaacctcgaagcgtttcacttgtaacaacgattgagaacttttgtcataaaattgaaatacttggttcgcattttcgtcatccgcggtcagccgcaattctgacgaactgcccatttagctggagatgattgtacatccttcacgtgaaaatttctcaagcgctgtgaacaagggttcagattttagattgagaggtgagccgttgaaacacgttcttcttatcgatgacgatgtcgctatgcggcatcttattatcgaataccttacgatccacgccttcaaagtgaccgcggtagccgacagcacccagttcactagagtactctcttccgcgacggtcgatgtcgtggttgttgatctaaatttaggtcgtgaagatgggcttgagatcgttcgaaatctggcggcaaagtctgatattccaatcataattatcagtggcgaccgccttgaggagacggataaagttgttgcactcgagctaggagcaagtgattttatcgctaagccgtttagtacgagagagtttcttgcacgcattcgggttgccttgcgcgtgcgccccaacgttgtccgctccaaagaccgacggtctttttgttttactgactggacacttaatctcaggcaacgtcgcttgatgtccgaagctggcggtgaggtgaaacttacggcaggtgagttcaatcttctcctcgcgtttttagagaaaccccgcgacgttctatcgcgcgagcaacttctcattgccagtcgagtacgcgacgaggaggtttacgacaggagtatagatgttctcattttgcggctgcgccgcaaacttgaggcggatccgtcaagccctcaactgataaaaacagcaagaggtgccggttatttctttgacgcggacgtgcaggtttcgcacggggggacgatggcagcctgagccaattgcatttgattaatttaggtgactgaggacgcggccagcggcctcaaacctacactcaatatttggtgaggggttccgataggtccctcttcaccaattgctcgatggcttctctccagcaaagaatgacgcgagcgcggcggtagccagcttgtggccgaaagctcgagcggtctccaaccccaacggatcaaaatgacttcgagcgacctcgagcaacgcaaccgggaacatgcgtgaggtctgaacgagaacggatttttctgtagttgaagggatcggataacttttcggggccacgcgaaatgatccatctgccagcatgctttcgaaatcgtccaacgcgcgccttaaaatcatttgtagcgacttcgagggactgtattgccgaacgaggttgtcatatgttttcgacacttgaggcgcgggcggtcgcgctgaaagaaaaacctggagctttttcggggacggaggtggactaagggcatccacagttagcttaagttgtcgatcgggactgtaaatgtgatcggcgacgagaggctcacgttgctggtctttctcgtcggctttttcaggcaagtgctggaggtccagcttctggggaacaagtgtcgggttgggatggtggatctcgggtcgagcaccagcaagccgccgtgcttcgccgaccgacaatgcgggcttgcgaattgccatcttcaagcctccaagattttgctgatcagtttcgaaatgaccacgacttcctccatcgcaatccgaagattcctctctatgaggcgcatcgtcggatcagttcccgtgtttagtaatgtaagatgcaacatgccgcgttctttcatcgcggcaaatgcatctctttcatgcatgggagacggtacaactggaaggctctctagcgtctctgacatcctgcgttgcgatgttgtcaatcggccgaccgggacgcgttggcgcaaaacagctgtaggaattgccaaattttcactcaacagcagctcgatgacgtagcggtaggtagatagtgcctcatcgatgtcgagcggcgttagcatggtggggatcagaagcaggtttgagctagcgatgattgtgttgttgagctcgctcgagccgccacgcgtatcggccaacgcataatcaaatccttcgagctcggcattttcataggctgcttcaagaaggggcatttcgtcggcggaatagacttcacagcgaggatcccaggtactgctttgtaaggcgttttctctccatcgcgtcagaggccggttttcgtcggcatcaaagagggccactcgtttaccgtcatttgccaaagcagcgcaaaggcccatgagtgcggtggttttgccagcaccccctttgaaagaacaaaacgtcaaaagttgcatattctgatcccgcctatcctgtgaaaccggagtgcatttgtatttttgttcgtataaatgtttttgtgattatcgatgagtaaaagcgttgttacactatttttatttcacattcgttataagacaattgcaaatgtagcaagtatattcagtattgactgtaaatgtactgttgatttcatattgagcagggctagacttccatccgtctacccgggcacatttcgtgctggagtatccagaccttccgctttctttggaggaagctatgtcaaaacacaccagagccacgtcgagtgagactaccatcaaccagcatcgatccctgaaagttgaagggttcaaggtcgtgagtgcccgtctgcgatcggccgagtatgaaaccttttcctatcaagcgcgcctgctgggactttcggatagtatggcaattcgcgttgcggtgcgccgcatcgggggctttctcgaaatagatgcagacacacgagaaaagatggaagccatacttcagtccatcggaatactctcaagcaatgtatccatgcttctatctgcctacgccgaagaccctcgatcggatctggaggctgtgcgagatgaacgtattgcttttggcgaggctttcgccgccctcgatggactactgcgctccattttgtccgtatcccggcgacggatcgacggtcgctcgttactgaaaggtgccttgtagcacttgaccacgcacctgacgggagaaaattggatgcccgatcgcgctcaagtaatcattcgcattgtgccaggaggtggaaccaagacccttcagcagataatcaatcagctggagtacctgtcccgaaagggaaagctggaactgcagcgttcagcccggcatctcgatattcccgttccgccggatcaaatccgtgagcttgcccaaagctgggttacggaggccgggatttatgacgaaagtcagtcagacgatgacaggcaacaagacttaacaacacacattattgtaagcttccccgcaggtaccgaccaaaccgcagcttatgaagcaagccgggaatgggcagccgagatgtttgggtcaggatacgggggtggccgctataactatctgacagcctaccacgtcgaccgcgatcatccacatttacatgtcgtggtcaatcgtcgggaacttctggggcaggggtggctgaaaatatccaggcgccatccccagctgaattatgacggcttacggaaaaagatggcagagatttcacttcgtcacggcatagtcctggatgcgacttcgcgagcagaaaggggaatagcagagcgaccaatcacatatgctgaatatcgacgccttgagcggatgcaggctcaaaagattcaattcgaagatacagattttgatgagacctcgcctgaggaagatcgtcgggacctcagtcaatcgttcgatccatttcgatcggacgcatctgccggcgaaccggaccgtgcaacccgacatgacaaacaaccgcttgaaccgcacgcccgtttccaggagcccgccggctccagcatcaaagccgacgcacggatccgcgtaccattggagagcgagcggggtgcccaaccatccgcgtccaaaatccctgtaactgggcatttcgggattgagacttcgtatgtcgctgaagccagcgtgcccaaacaaagcggcaattccgatacttctcgcccggtgactgacgttgccatgcacacagtcgagcgccagcagcgatcaaaacgacgtcatgacgaggaggcaggtccgagcggagcaaaccgtaaaagattgaaggccgcgcaagttgattccgaggcaaatgtcggtgagcccgacggtcgcgatgacagcaacaaggcggctgatccggtgtctgcttccatccgtaccgagcaaccggaagcttctccaacgtgtccgcgtgaccgtcacgatggagaattgggagaacgcaaacgtgcaagaggtaatcgtcgcgacgatgggcgcggggggacctagactagtagacaggaaggaccgaataatggcaaatggtcagttcacgatacgctctgctcgcccggcctccgtcggactgacaggcgaacggcgtggagccgcatccgcctctagctctgcactgtccaatgttcaaagagatgttagggataggctgattccaactagctcaccaagattaccaaatgcagccatattgcgtgattcctcgggaagagcgtcgactggtctgcggtacatggcggctactcttcattggtctgcgatcgcgccattatcgctaataaacagcaacgacctggctccggccgcttatgactttgagacgcgaaataacgcaagaaatgtgactgccaaagtcggcagggcagtccctgttcccaagcaaggcgggctcggcaaaacgctcgcacccgtaccccttagtacacgtatatcaagggtcaattccgaccgaagactgcccgctgacgcagaagaccgccctgaaacgcgcgacccccagaaaggacgtggcagtcatggtgcgacgccaaccttacatgaaaagattggaaccgcgtttgctcgaagattgcgaaagcatacgtactatattgtttgcagttgctgccagacccggagcgcgttgacgatgggtgcaaagatttcggtgaagtcatgaactccagcaagacttcgccccagcgtatgaccctgagcatcgtatgttcgctggcagccggtttttgtgcggccagctgctatgtaacgttccgccggggcttcaacggcgaagcgatgatgacgttcgacgttttcgctttttggtatgagaccccgctttacttgggttatgccagcaccgtcttctggcgtggtttatctgttgtcatctttacctcgctgatcgttctttcaagtcagctcatcatatcgctgcgcaatcagaagcatcatgggacagctcgttgggcagaaattggcgaaatgcggcatgctggttatctgcagcgttacagtcgcatcaaggggccgatctttggaaagacatgtggtcccctttggttcggcagttatttgaccaatggcgaacagccacacagtcttgtcgtcgcgccaacgcgtgctggcaaaggcgtcggcatcgtcattccaacgctgttgaccttcaagggctcggtaatcgcccttgacgtcaagggagaattgtttgaactgacgtccagagcacgcaaagcgagcggcgacgcagttttcaagttctcccccctagatcctgagcggaagactcattgttacaatccggtcctggatattgccgcacttccgcccgaacgccagttcactgaaacacgccgtctagctgcgaaccttattacggctaagggaaagggagcagaaggctttattgacggcgcacgtgacctgttcgtcgcgggaatccttacctgcattgagcgtggcacaccaacgattggcgcggtatatgacctatttgcgcagcctggcgaaaagtataagctttttgcgcaactcgcggaggaaagcctaaacaaagaggctcagcgtatcttcgataatatggcgggcaacgacacgaaaattctgacatcgtacacctctgtgctgggcgacggtggactgaacctgtgggctgatccgcttatcaaagcagcgacaagccggtcagacttttccgtttacgatctccggaggaagaagacctgcatttatctttgtgtcagtcccaacgatctggaggtcttggcaccacttatgcgcctgatgtttcagcagctcgtgtcaatcttgcagagatcgctgccaggtgaagacgagtgccatgaagttttatttctcctcgacgaattcaaacacctgggcaagcttgaggccatagagaccgcgatcacaaccatcgccggttacagaggccgctttatgtttattattcaaagtctttcggccttgtcgggcacatacgatgacgcaggaaaacaaaactttctgagcaatactggcgtacaagtatttatggccacggctgatgacgaaactccaacctacatctcaaaagctatcggcgaatatacgtttaaagcgcgttcgacctcttacagtcaagccagaatgttcgaccacaacatccagatttctgatcaaggtgcagcccttttgcgccccgaacaagtgcgcctgctagacgatcagagtgaaatcgttctcatcaaagggcgacctccactcaaattacgaaaggtgcagtattattccgatcgtacgctgaaaggccttttcgaacgccagatgggctctctgcctgagcccgcacccttgatgctttccgactatagcaacgatcaagttcaataccacttggctccgatagcaaattttaatgaggatgctgcaccgcaaaacagaactgtggccgaggaccatggaagtgttaaagtcggtgctgatatccctgaacgcgtgatgggaataaatggtgacgaggaacaagccgatgcgggcgagataccgccggaatcggttgtgcctccagaattgacgctcgctctgaccgctcaacagcaattgttggaccagattattgcacttcagcaaagatcgaggtccgcaccggcatagcctgcgaaatgatcttaatggtgcaattcgtttcaggcggcatgttgcggttcaacaaagtgtacgccagatcccaattggccctttacgaggtgtcggtatgacaggaaagtcgaaagttcacataagaggttcggctgacgcgcttcctgacgttcctggcggaagtactaccgccccttttttaaccgaaccttctcgggatcaggttgatgcctcgtttgaggtccaaaccgactacagccagtctacttccgtgtcgtttacctatgatggtgttggacttggtcctgccgagcgtgcggcttacgagaactggtgcgaaccgggccggcccacttggaaagatcttataatcaaggcacgtgtcgatccgattgacgatgtgacctggctccgagatttagaagaggacaccccctcaaccttcagatacgaagggatgcctctgggcatcggggaacgacaggcctacgaaaattggcaagaggacgctcagccgacatgggaagaccttgttgtcagcgcacgcttgacggaacttggccgtccacacgggattaccggcgagtatacatccctcgcaggatcgaagaatacaagttcaatttcattgaagcgaaagcggagcaacttaattgatgatgagaattcatccggatcgttttcatatgacgggatgaagctcggggaagccgagcgttctgcatatggtgactgggccgaggcggagccacccacgtggaaagatttggtattgagggcacgcgtttcctcgatcaatgactctgcttggctttttgattcacaaacatcttcatcatcatttgaatacaacggtgttcccttgggcgagccggaacggcaggctctcagacaatggcaaggagacgctcagcctacctgggaagatctcgttgttaacgcgcgtatggcagaactttgccatgctggttggattgaaggtcaaaaaggttgctttgaagagcgcggggaggctctgcccgcgtcggaacgcggttcgcaacgccccattggtcaacggacagattcctccgattcttttgtgtatgatggcacaaggctcggagcacctgagcgaactgcttatgaacgctggagtaagagggaacgcccgacttgggaagatctcatcttagatgcacaccaggccaggactgaaagtgacgctgttacgacccaagcgattggtcagtcgtcctcaccggttttcttatatgaaggaaagtcgctcggagacagggaacgaaaggcttacgaaaaatggcggcagccagcccaaccgcgatggcaaaatcttgtagtgaacgctcgtctggcagaaatcgatccctcagcctggattgccgatgagcgcgatccgcttgatgatagcgacgcgcttggtcgcccgtcgtacacaagcttgacggatagatcagacgtccctttagacgatcaatcaatctatcgtcgttccgacctagtaagggagcaggtgccagaatcgtctcaaaggcaattcgcagcatgttcagaatctgaaacgaggcctgtgcaatggtttactgcttctgggtcagatgcaaacaatacggaaaatatcaccgccagcgatcccgtcgatcgcacgggtggagttaagcggctaggctccaaaagcgacagaaccgttacagcttctatccatgacgtgaattccagcacaaggcgactgttgcttaacgaatttggatcggaggctccgcgcccttcgccagaaaagactgttcgcttaagaagcgacaatattggcacctatgggagccggaaaaatgaacgagcgcggctcgcgaccgaaaccggtgcgtatgagtcggagcatattttcgggttcaaggctgtccacgatactgcgagagcgacgaaagagggccggcgtctcgaaaggcccatgcccgcctaccttgaggataaggggcttcatcgccaacatattggcaccgggagaggacggaccaaacttgtcgggcgcggatggccggatgacacaagctatcgctcggatcaaagggcaactctgtcggaccccgttgcgcgctcggaaggcgcgacggcctcaaatgggtatcaattgaaccaattgggttacgcgcaccaactcgctagcgatggcctgcaaagtgaatcgcccgatggtgttgccttgccaattcaagtggcaacaacgagctacaactatacagtgagccgcgatcctgtccttgttccgccggataaaaacgaagcccctcaattgctgcatcttggtccccgtggtcaaaccgaagctgttcttgcccgcgaaacagcattgactggaaaatggccgactctcgagcgtgagcagcaagtgtatcgcgagtttttggccttatatgacgtaaaaaaagatcttgaggccaaatcagtcggcgtaagacggaaaaaaaaagaagttatttctgcgttagaccgaactgcgcgcttgataagcacgtcgccttcgaaagctcgatccaaagcagagactgaaaaagccattgatgagctcgatgatcgacgagtttatgatccgcgtgatcgagctcaagacaaagcgtttaaacgctgataagtcgccaatatagtgatcatttgcagtattcgcatcgatcgctggttgatattctgccgctggtcgaccggctgctcgtcgccaaaaatgctcacagggatacgatggcctcggtcaggccgcgtgcgtcctgtctttccagttcctccctttcagctcgattgtggcatcatttattgcctgctcattgcagttgaaacgcgatatccgtttcaagacccgggtatggatggtactttggagatatgagcacttgccagacttcccggtcggagacttaaaaattccgataagaggttacggacgacggaccttataagtggatcgtctagtggtggcgccgatcaaaacagttccgcccccggctttgctcaaagtagcaaagcagctttatctcgggttgcggaggattttctagaaaaccgcaattttgcaggagagaacatatggccatcatcaagccgcatgtgaacaaaaataggacaacctcgccgatagagagaccggagtctctcatagaggaaatgagcggcagtcatccgccgagtggttttaccaacctggatctcgctatgatcgagctggaggactttgtccatcggtgcccgctcccagaagacaatcttgctggtcagaaggagtgagacgatggatccgtctagcaatgagaatgtctatgtgggtcgcggtcacaacatcgaaaatgatgatgacactgaccccaggcgttggaagaaggcgaatatcagttccaacaccatctccgatattcagatgacgaatggcgaagacgtacaatcagggagccctacccgaacggaagttgtaagcccacgtctggattatggatcggtcgactcctcctccagcctttattctggcagcgagcacggaaatcaagctgagattcaaaaagagctgtccgtcttgttctcgaacatgtctttgccaggcaacgatcggcgcccggacgaatacattctcgtgcatcaaacgggacaagatgcttttactggtattgccaaaggcaacctcgaccaaatgcccaccaaggcggaatttaacgcgtgctgccgtctctacagggacggagccggtaattactacccgccacctctcgcattcgacaagattagcgttccagagcaactggaggaaaaatgggggatgatggaggcgaaggaacgtaacaaactgcggtttcagtacaagttggacgtatggaatcatgcgcacgctgatatggggatcacgggcacagagatcttttatcaaacagataagaacataaagctcgaccggaattataaactaagacctgaagaccgatacgtacaaacagaaaaatacgggcgccgggaaattcaaaagcgatatcaacacgaactccaggctggttcgctgctgcccgatattatgatcaaaactccccaaaatgacatccacttcgtgtacaggtttgccggcgacaattacgccaacaaacagttcagcgagtttgaacacaccgtcaagcgcaggtatggcgacgagactgagatcaaattgaagtcaaagtcaggcattatgcatgactcgaaatatctggaatcctgggaacggggcagtgcggatattcgcttcgcggaattcgttggggaaaatagagctcacaatcggcagtttccaactgcgacagtaaatatgggacagcagccagacgggcagggcggtttgacccgcgaccgtcatgtgagcgttgacttcctaatgcaaagcgcacccaattcgccttgggcgcaagctttgaaaaagggagaactgtgggatcgcgttcagttgcttgctcgcgacggcaaccgctatctgtcgccgcccagattggaatattctgaccctgcacatttcaccgagttgatgaaccgggttggtttacccgcatcgatgggtcggcaaagccatgcggctagtatcaaattcgaaaagtttgacgcgcaggcagcggttattgtcttaaatggcccagagttacgtgacattcatgacttgtctcctgaaaaactgcaaaatttgtccaccaaagatgtcatcgtcgccgatcgcaatgagaatggtcagagaactggcacgtacaccagcgtcgcggaatatgagcgcttgcagttaaggctgccacccgatgcagcgggggtgcttggtgaagcaactgacaaatattcacgtgatttcgttcggccagagccggcgtcgcgtccaatcagtgacagccgcaggatatacgaaagtcgaccgcgtagccaaagcgtcaacagcttttgacgttcctgctgccgcgtcaacgaggaagctcgtttgacccgggtttgccaatgaaagggctcaatcatggtgaacactacaaagaaaagttttgcgaagtcgcttacggcagatatgcgccgttctgctcagcgcgttgtcgagcaaatgcgaaaagcattgattaccgaagaagaggcgctcaagcggcaagccagactggagagtcccgataggaagcgaaagtatgctgctgatatggcgatagtcgacaaactcgacgtagggtttcgaggcgaaataggctataaaattcttggaaataaccggcttcgagtagacaaccataaagaattaacgcgtgagcacggtagacttcgcaaaaccaaaacggttctgaagcgtaacccggtgacgcaggaagtctatttgggtttatatgaaaggaagtcctggttaagtgtcagcagccatttgtatgctgcggacggcacactccgcatgaagcacgtgaaatacaaagacggacgttttgaggaaaaatgggagcgcgacgaaaatggcgacctgatccgcacaaggtacgccaaccgtggcaggctctttcaacctgtatccgagaaaatgggcgcgccgtatcggagcggccctgacgaccggctctatcgcgatctaacccgtcgaaacggtttcagacgggagacattcgaacgggacgatcacggaaacctcgagcgtatcggcagcaaccatgtcggcttttccaagatttcagtgaaggcacccaatcgtcaaacctcccagacgaagattcaaaaacttggtggcgctttcaacaaatcttttaggtcccttctggacaaggagggcaatgaaatgggccgcgatattttgagccatcgacggctctataacaagcggtctgctgtctacgatgaagctaccggacaattgaagagtgccaagcataccttcggcaagatctacaggagcgaaaccgaatatctcagcgcgggcctcaagaaggtttcaaaaaagatactcggggtgacggtctaccggaaatttgcggcgctcagcgagcgagaatccgaggctgagagactgcgtagttttgaatccggtgcgcatcgccagatctggcaggagcgggcagcgattcccggttcgcccctcccggagactgatgacattcatttcgcacagcagtcgcacctagccaaagccaaccctgatcacgtcgaagctgacgtcacgcgtgtgacagatcaacatgttgatgttgctggacaaacatcatcgtctccccaacggaacttggaaggatggttagattctcaatcacgatacaagccagcaaacatgctgttgtcaaatccagaccttcaagcgaacggacctcgcccatacgaagggttagctcatctcaccctccggcgcgataatgaatctgacgggcacaaggagaatgatcagcggctgcgacatttctcccagccagagccgttggtgttaccgcatcccgggtcgccggaaataactaaggtgtttggctcgcggggagagccggcacacccgagtggaaatctgcacacggcggttggagaaacggcttgcgaaggaccggtgatgtcttcatcctcggacaatcatcagccagctccaggacagcaagaacttttaagtttccttcataatgcgccagccccagtttctgtggcaatacatgatgatcaagagcgacttgcgggggaggcgcccggcggctctttcagaggtagctcagggcgaacgagttcaatgtcggagagtatcttcgacgaagatgtacaagggcatttggtacgggattattcgatcaatactactaacgggtttattgacccgcaatcgttgttcggtgaaccggacttatcgagaggtccaaaatcggggccagaaattccatcggaagattaccatttgtcagcttcggaacaggaaaatttgctgaatcaattgcttagtgtgccactgccggttccttcaccgaagcccgaatgcgcgaggtctatgattttcgaaggttcacgttcaagagagcgttccacctccagagggttctaaggtggaacgcgtctaggcttgcctatcatcaccacctcatgatggtcgcggagaccttcgaagagatatccgacatcattggagaagctgggccggaaactagtgtacctcgcgaatgcatctagatccaatccaatatgcatggcatgccgaatccatgtgggagtttattcttgacacagatatttatgatataataactgagtaagcttaacataaggaggaaaaacatatgttacgcagcagcaacgatgttacgcagcagggcagtcgccctaaaacaaagttaggtggctcaagtatgggcatcattcgcacatgtaggctcggccctgaccaagtcaaatccatgcgggctgctcttgatcttttcggtcgtgagttcggagacgtagccacctactcccaacatcagccggactccgattacctcgggaacttgctccgtagtaagacattcatcgcgcttgctgccttcgaccaagaagcggttgttggcgctctcgcggcttacgttctgcccaagtttgagcagccgcgtagtgagatctatatctatgatctcgcagtctccggcgagcaccggaggcagggcattgccaccgcgctcatcaatctcctcaagcatgaggccaacgcgcttggtgcttatgtgatctacgtgcaagcagattacggtgacgatcccgcagtggctctctatacaaagttgggcatacgggaagaagtgatgcactttgatatcgacccaagtaccgccacctaataatgtctaacaattcgttcaagccgacgccgcttcgcggcgcggcttaactcaagcgttagatgcactatacgtaccaatccaaatcggatccccctgcagggctgagataggtgcctcactgattaagcattggtaactgtcagaccaagtttactcatatatactttagattgatttaaaacttcatttttaatttaaaaggatctaggtgaagatcctttttgataatctcatgaccaaaatcccttaacgtgagttttcgttccactgagcgtcagaccccgtagaaaagatcaaaggatcttcttgagatcctttttttctgcgcgtaatctgctgcttgcaaacaaaaaaaccaccgctaccagcggtggtttgtttgccggatcaagagctaccaactctttttccgaaggtaactggcttcagcagagcgcagataccaaatactgtccttctagtgtagccgtagttaggccaccacttcaagaactctgtagcaccgcctacatacctcgctctgctaatcctgttaccagtggctgctgccagtggcgataagtcgtgtcttaccgggttggactcaagacgatagttaccggataaggcgcagcggtcgggctgaacggggggttcgtgcacacagcccagcttggagcgaacgacctacaccgaactgagatacctacagcgtgagctatgagaaagcgccacgcttcccgaagggagaaaggcggacaggtatccggtaagcggcagggtcggaacaggagagcgcacgagggagcttccagggggaaacgcctggtatctttatagtcctgtcgggtttcgccacctctgacttgagcgtcgatttttgtgatgctcgtcaggggggcggagcctatggaaaaacgccagcaacgcggcctttttacggttcctggccttttgctggccttttgctcacatgttctttcctgcgttatcccctgattctgtggataaccgtattaccgcctttgagtgagctgataccgctcgccgcagccgaacgaccgagcgcagcgagtcagtgagcgaggaagcggaagagcgcctgatgcggtattttctccttacgcatctgtgcggtatttcacaccgcatatggtgcactctcagtacaatctgctctgatgccgcatagttaagccagtatacactccgctatcgctacgtgactgggtcatggctgcgccccgacacccgccaacacccgctgacgcgccctgacgggcttgtctgctcccggcatccgcttacagacaagctgtgaccgtctccgggagctgcatgtgtcagaggttttcaccgtcatcaccgaaacgcgcgaggcagcagatctatcgatggtacctatctgcagacggaagggattcctgttaattaaaacagcttgcgtcatgcggtcgctgcgtatatgatgcgatgagtaaataaacaaatacgcaaggggaacgcatgaaggttatcgctgtacttaaccagaaaggcgggtcaggcaagacgaccatcgcaacccatctagcccgcgccctgcaactcgccggggccgatgttctgttagtcgattccgatccccagggcagtgcccgcgattgggcggccgtgcgggaagatcaaccgctaaccgttgtcggcatcgaccgcccgacgattgaccgcgacgtgaaggccatcggccggcgcgacttcgtagtgatcgacggagcgccccaggcggcggacttggctgtgtccgcgatcaaggcagccgacttcgtgctgattccggtgcagccaagcccttacgacatatgggccaccgccgacctggtggagctggttaagcagcgcattgaggtcacggatggaaggctacaagcggcctttgtcgtgtcgcgggcgatcaaaggcacgcgcatcggcggtgaggttgccgaggcgctggccgggtacgagctgcccattcttgagtcccgtatcacgcagcgcgtgagctacccaggcactgccgccgccggcacaaccgttcttgaatcagaacccgagggcgacgctgcccgcgaggtccaggcgctggccgctgaaattaaatcaaaactcatttgagttaatgaggtaaagagaaaatgagcaaaagcacaaacacgctaagtgccggccgtccgagcgcacgcagcagcaaggctgcaacgttggccagcctcgcagacacgccagccatgaagcgggtcaactttcagttgccggcggaggatcacaccaagctgaagatgtacgcggtacgccaaggcaagaccattaccgagctgctatctgaatacatcgcgcagctaccagagtaaatgagcaaatgaataaatgagtagatgaattttagcggctaaaggaggcggcatggaaaatcaagaacaaccaggcaccgacgccgtggaatgccccatgtgtggaggaacgggcggttggccaggcgtaagcggctgggttgcctgccggccctgcaatggcactggaacccccaagcccgaggaatcggcgtgagcggtcgcaaaccatccggcccggtacaaatcggcgcggcgctgggtgatgacctggtggagaagttgaaggcagcgcaggccgcccagcggcaacgcatcgaggcagaagcacgccccggtgaatcgtggcaagcagccgctgatcgaatccgcaaagaatcccggcaaccgccggcagccggtgcgccgtcgattaggaagccgcccaagggcgacgagcaaccagattttttcgttccgatgctctatgacgtgggcacccgcgatagtcgcagcatcatggacgtggccgttttccgtctgtcgaagcgtgaccgacgagctggcgaggtgatccgctacgagcttccagacgggcacgtagaggtttccgcagggccggcaggcatggccagtgtgtgggattacgacctggtactgatggcggtttcccatctaaccgaatccatgaaccgataccgggaagggaagggagacaagcccggccgcgtgttccgtccacacgttgcggacgtactcaagttctgccggcgagccgatggcggaaagcagaaagacgacctggtagaaacctgcattcggttaaacaccacgcacgttgccatgcagcgtacgaagaaggccaagaacggccgcctggtgacggtatccgagggtgaagccttgattagccgctacaagatcgtaaagagcgaaaccgggcggccggagtacatcgagatcgagctagctgattggatgtaccgcgagatcacagaaggcaagaacccggacgtgctgacggttcaccccgattactttttgatcgatcccggcatcggccgttttctctaccgcctggcacgccgcgccgcaggcaaggcagaagccagatggttgttcaagacgatctacgaacgcagtggcagcgccggagagttcaagaagttctgtttcaccgtgcgcaagctgatcgggtcaaatgacctgccggagtacgatttgaaggaggaggcggggcaggctggcccgatcctagtcatgcgctaccgcaacctgatcgagggcgaagcatccgccggttcctaatgtacggagcagatgctagggcaaattgccctagcaggggaaaaaggtcgaaaaggtctctttcctgtggatagcacgtacattgggaacccaaagccgtacattgggaaccggaacccgtacattgggaacccaaagccgtacattgggaaccggtcacacatgtaagtgactgatataaaagagaaaaaaggcgatttttccgcctaaaactctttaaaacttattaaaactcttaaaacccgcctggcctgtgcataactgtctggccagcgcacagccgaagagctgcaaaaagcgcctacccttcggtcgctgcgctccctacgccccgccgcttcgcgtcggcctatgcatataattgtggtttcaaaatcggctccgtcgatactatgttatacgccaactctgaaaacaactttgaaaaagctgttttctggtattt

SEQ ID NO: 2 - DNA, 12109 bp, Artificial
  Synthetic construct comprising the T-DNA (RB to LB):  RB + LOXP + CCDB + GM-UBQ PRO-V1::GM-UBQ 5' UTR::GM-UBQ INTRON1::CTP::SPCN::UBQ14 TERM + GM-EF1A2 PRO:: GM-EF1A2 5' UTR:: GM-EF1A2 INTRON1:: GM-EF1A2 5' UTR::DS-RED2::UBQ3 TERM + LB
caaacaaacatacacagcgatttattcacacgaacccgaattacaacggtatatatcctgtcagccaacaccaaaacatcaaaaaaatcgggatcaggatcaggatctgcggccgcatcctgcaggtttaaacggccggccttcactagctagctgctaagctcaaacgagcaggaagcaacgagagggtggcgcgcgaccgacgtgcgtacgtagcatgagcctgagtggagacgttggacgtgtatgtatatacctctctgcgtgttaactatgtacgtaagcggcaggcagtgcaataagtgtggctctgtagtatgtacgtgcgggtacgatgctgtaagctactgaggcaagtccataaataaataatgacacgtgcgtgttctataatctcttcgcttcttcatttgtccccttgcggagtttggcatccattgatgccgttacgctgagaacagacacagcagacgaaccaaaagtgagttcttgtatgaaactatgacccttcatcgctaggctcaaacagcaccccgtacgaacacagcaaattagtcatctaactattagcccctacatgtttcagacgatacataaatatagcccatccttagcaattagctattggccctgcccatcccaagcaatgatctcgaagtatttttaatatatagtatttttaatatgtagcttttaaaattagaagataattttgagacaaaaatctccaagtatttttttgggtattttttactgcctccgtttttctttatttctcgtcacctagtttaattttgtgctaatcggctataaacgaaacagagagaaaagttactctaaaagcaactccaacagattagatataaatcttatatcctgcctagagctgttaaaaagatagacaactttagtggattagtgtatgcaacaaactctccaaatttaagtatcccaactacccaacgcatatcgttcccttttcattggcgcacgaactttcacctgctatagccgacgtacatgttcgttttttttgggcggcgcttactttcttccccgttcgttctcagcatcgcaactcaatttgttatggcggagaagcccttgtatcccaggtagtaatgcacagatatgcattattattattcataaaatcgagctagttaccctatgaggtgacatgaagcgctcacggttactatgacggttagcttcacgactgttggtggcagtagcgtacgacttagctatagttccggacttacctaactgactagagtcacacttagctgaccctagtcacttaataacttcgtatagcatacattatacgaagttatggcgcgccaagcttggatctcctgcaggatctggccggccggatgggcggatctcgtacctcaactttgtatagaaaagttgaacgagaaacgtaaaatgatataaatatcaatatattaaattagattttgcataaaaaacagactacataatactgtaaaacacaacatatccagtcactatggtcgaccgacagccttccaaatgttcttctcaaacggaatcgtcgtatccagcctactcgctattgtcctcaatgccgtattaaatcataaaaagaaataagaaaaagaggtgcgagcctcttttttgtgtgacaaaataaaaacatctacctattcatatacgctagtgtcatagtcctgaaaatcatctgcatcaagaacaatttcacaactcttatacttttctcttacaagtcgttcggcttcatctggattttcagcctctatacttactaaacgtgataaagtttctgtaatttctactgtatcgacctgcagactggctgtgtataagggagcctgacatttatattccccagaacatcaggttaatggcgtttttgatgtcattttcgcggtggctgagatcagccacttcttccccgataacggagaccggcacactggccatatcggtggtcatcatgcgccagctttcatccccgatatgcaccaccgggtaaagttcacgggagactttatctgacagcagacgtgcactggccagggggatcaccatccgtcgcccgggcgtgtcaataatatcactctgtacatccacaaacagacgataacggctctctcttttataggtgtaaaccttaaactgcatttcaccagcccctgttctcgtcagcaaaagagccgttcatttcaataaaccgggcgacctcagccatcccttcctgattttccgctttccagcgttcggcacgcagacgacgggcttcattctgcatggttgtgcttaccagaccggagatattgacatcatatatgccttgagcaactgatagctgtcgctgtcaactgtcactgtaatacgctgcttcatagcatacctctttttgacatacttcgggtatacatatcagtatatattcttataccgcaaaaatcagcgcgcaaatacgcatactgttatctggcttttagtaagccggatccacgcggcgtttacgccccccctgccactcatcgcagtactgttgtaattcattaagcattctgccgacatggaagccatcacaaacggcatgatgaacctgaatcgccagcggcatcagcaccttgtcgccttgcgtataatatttgcccatggtgaaaacgggggcgaagaagttgtccatattggccacgtttaaatcaaaactggtgaaactcacccagggattggctgagacgaaaaacatattctcaataaaccctttagggaaataggccaggttttcaccgtaacacgccacatcttgcgaatatatgtgtagaaactgccggaaatcgtcgtggtattcactccagagcgatgaaaacgtttcagtttgctcatggaaaacggtgtaacaagggtgaacactatcccatatcaccagctcaccgtctttcattgccatacggaattccggatgagcattcatcaggcgggcaagaatgtgaataaaggccggataaaacttgtgcttatttttctttacggtctttaaaaaggccgtaatatccagctgaacggtctggttataggtacattgagcaactgactgaaatgcctcaaaatgttctttacgatgccattgggatatatcaacggtggtatatccagtgatttttttctccattttagcttccttagctcctgaaaatctcgataactcaaaaaatacgcccggtagtgatcttatttcattatggtgaaagttggaacctcttacgtgccgatcaacgtctcattttcgccaaaagttggcccagggcttcccggtatcaacagggacaccaggatttatttattctgcgaagtgatcttccgtcacaggtatttattcggcgcaaagtgcgtcgggtgatgctgccaacttacggccgccatagtgactggatatgttgtgttttacagtattatgtagtctgttttttatgcaaaatctaatttaatatattgatatttatatcattttacgtttctcgttcaactttattatacaaagttgatcacgtgagagtctaaaaacggcccctaactaacgcttagttgcccgctagattagtcccccgttagtgcctagttagacacacgacgaactaggggctataaggatttaaatatggtacggatccgtcgacggcgcgccgcggacctgaattccagcacactggcggccgttaataacttcgtatagcatacattatacgaagttatagtggcatcacgtttctagttctagacccatcagctgaggtacaaattacggccagaatggccatctggattcagcagggggtgattgcggttacatcatgtacggaaaaataattctaatccttgatttaaatttgaacttgactatttatttattctttatttcattttgtaaatcattttatgtatctcctggcaagcaattttatccaccttgcaccaacaccttcgggttccataatcaaaccaccttaacttcacaccatgctgtaactcacaccgcccagcatctccaatgtgaaagaagctaaaatttaataaacaatcatacgaagcagtgacaaaataccagatggtattaatgcttcgataaaattaattggaaagtataaaatggtagaaaataataaattataattaatttaagtaagataaaaaataattaaaaactaaaatgttaaaattttaaaaaaattattttaaataatatttaaaaacattaaaaatcattttaaaaaatttatttatagaacaattaaataaatatttcagctaataaaaaacaaaagcttacctagccttagaagacaacttgtccaacaattagatgatacccattgcccttacgttttctttaacatcaattattgtttttgtcaacaagctatcttttagttttattttattggtaaaaaatatgtcgccttcaagttgcatcatttaacacatctcgtcattagaaaaataaaactcttccctaaacgattagtagaaaaaatcattcgataataaataagaaagaaaaattagaaaaaaataacttcattttaaaaaaatcattaaggctatattttttaaatgactaattttatatagactgtaactaaaagtatacaatttattatgctatgtatcttaaagaattacttataaaaatctacggaagaatatcttacaaagtgaaaaacaaatgagaaagaatttagtgggatgattatgattttatttgaaaattgaaaaaataattattaaagactttagtggagtaagaaagctttcctattagtcttttcttatccataaaaaaaaaaaaaaaaatctagcgtgacagcttttccatagattttaataatgtaaaatactggtagcagccgaccgttcaggtaatggacactgtggtcctaacttgcaacgggtgcgggcccaatttaataacgccgtggtaacggataaagccaagcgtgaagcggtgaaggtacatctctgactccgtcaagattacgaaaccgtcaactacgaaggactccccgaaatatcatctgtgtcataaacaccaagtcacaccatacatgggcacgcgtcacaatatgattggagaacggttccaccgcatatgctataaaatgcccccacacccctcgaccctaatcgcacttcaattgcaatcaaattagttcattctctttgcgcagttccctacctctcctttcaaggttcgtagatttcttccgtttttttttcttcttctttattgtttgttctacatcagcatgatgttgatttgattgtgttttctatcgtttcatcgattataaattttcataatcagaagattcagcttttattaatgcaagaacgtccttaattgatgattttataaccgtaaattaggtctaattagagtttttttcataaagattttcagatccgtttacaacaagccttaattgttgattctgtagtcgtagattaaggtttttttcatgaactacttcagatccgttaaacaacagccttatttgttgatacttcagtcgtttttcaagaaattgttcagatccgttgataaaagccttattcgttgattctgtatggtatttcaagagatattgctcaggtcctttagcaactaccttatttgttgattctgtggccatagattaggattttttttcacgaaattgcttcttgaaattacgtgatggattttgattctgatttatcttgtgattgttgactctacagccatggctgcaactactcttacatctgctttacctggtgctttcagttcatcccagagaccaagtgctcctttcaacttacaaagatcacctagagtgcttagaaggttcaacagaaagacaggacgtcaacctcgtggacttgttcgtgctgcaaaggctcaagcggcgcaaaacctgccagagaaattcgatgaaacaagactctgggaggccctcaggggatttggggttagtccaagtagggttacttacgctcccgtcggattcggagattaccactggaccgtcacagatgaagacgggagaccttggttcgcaactgtcagtgacctcgaacacaaagagcattgcgggcagggagcacaagcagcccttaaaggactcagacaagctatggacactgccctcgcacttagagatagggacggactcagattcgtggttgctccagtggcagcaacagatgggggtggccctgtccttccccttgacgctaggtatgcactcacagtcttccctcacgtcccaggaagaacaggagagttcggacaaagactcacagaggcagagagggacagactgcttgctcttctggcagaactccacggaagaacacctcctgaaacaaccccaccagccgatatggaaccaccaggacttcctggtgttagagcagcactcgccgaaagtgaaggaccttggagtggaggaccatttgcagaacccgctagacttcttctcagagaacacgaggccacactgcacgcaagactcgctgaattcgaagccctcgtcgcaagagttaagggtcgtggagcacctcttgtcgttacccacggagaaccacacccaggcaacttgatcctcggagaggaaggctatctcctcgtggactgggatacagttggactggctccagctgaaagggatttgagtctcatctcagacgacccagctgacctcgcaagatacgcagagcttacaggaagaactccagacccagacgcactcgcactctatagactgcgttggagtctccttgatgtggctgagttcgtcgagtggttcagggctgaacaccaaagaacccaagacaccgagagtgcatggaaggggttcactgacacacttgggcaattggctgctggtggatcagctgcatagcaaacttatctctgttatgaatcagaagaagttcatgtctcgtttcatttaaaactttggtggtttgtgttttggggccttgtaaagcccctgatgaataattgttcaactatgtttccgttcctgtgttatacctttctttctaatgagtaatgacatcaaacttcttctgtattgaaattatgtccttgtgagtctctttatcatcgtttcgtctttacattatatgtgctacttttgtctaatgagcctgaaaagtggctccaatggtacgcactggaagatttgttggcttctggtagatatagcgacagtgttgagcttgtaatatcatgtctcttattgctaaattagttcctttcttaacagaaaccttcaaagtttttgtttttgttttcatttacctaatgtacacatacgctggccatgactaacaacatgtccaggcttagagcatatttttttctagcttaaattgttaacttgtcattcagtaaaatccgagaattgtgaagctctaattgaagctaattcgttttataaagtcagttaaaaagtatactaaattatccaacttttcttcaaaatctcaaaattctatgacaaaacgatagtctttgtttatgtcagtaccacaaagaggtggaaaaaaacaccaaaaaaacaataagcaaactatacactgagaagaaaaataaaagagagctcaatagatgttttatactaacggtagattagatcaaagatccaagctttactctacatagagcagaacccagaatcccttcatatctcttttattctagcaccgataatctactgaaaagaagacacttagagctctgtctctttgtcaaagaagtcccagccgtcatccagaagctccttacgttcattaacagaggccgcaattggatcgggtttacttattttgtgggtatctatacttttattagatttttaatcaggctcctgatttctttttatttcgattgaattcctgaacttgtattattcagtagatcgaataaattataaaaagataaaatcataaaataatattttatcctatcaatcatattaaagcaatgaatatgtaaaattaatcttatctttattttaaaaaatcatataggtttagtatttttttaaaaataaagataggattagttttactattcactgcttattacttttaaaaaaatcataaaggtttagtatttttttaaaataaatataggaatagttttactattcactgctttaatagaaaaatagtttaaaatttaagatagttttaatcccagcatttgccacgtttgaacgtgagccgaaacgatgtcgttacattatcttaacctagctgaaacgatgtcgtcataatatcgccaaatgccaactggactacgtcgaacccacaaatcccacaaagcgcgtgaaatcaaatcgctcaaaccacaaaaaagaacaacgcgtttgttacacgctcaatcccacgcgagtagagcacagtaaccttcaaataagcgaatggggcataatcagaaatccgaaataaacctaggggcattatcggaaatgaaaagtagctcactcaatataaaaatctaggaaccctagttttcgttatcactctgtgctccctcgctctatttctcagtctctgtgtttgcggctgaggattccgaacgagtgaccttcttcgtttctcgcaaaggtaacagcctctgctcttgtctcttcgattcgatctatgcctgtctcttatttacgatgatgtttcttcggttatgtttttttatttatgctttatgctgttgatgttcggttgtttgtttcgctttgtttttgtggttcagttttttaggattcttttggtttttgaatcgattaatcggaagagattttcgagttatttggtgtgttggaggtgaatcttttttttgaggtcatagatctgttgtatttgtgttataaacatgcgactttgtatgattttttacgaggttatgatgttctggttgttttattatgaatctgttgagacagaaccatgatttttgttgatgttcgtttacactattaaaggtttgttttaacaggattaaaagttttttaagcatgttgaaggagtcttgtagatatgtaaccgtcgatagtttttttgtgggtttgttcacatgttatcaagcttaatcttttactatgtatgcgaccatatctggatccagcaaaggcgattttttaattccttgtgaaacttttgtaatatgaagttgaaattttgttattggtaaactataaatgtgtgaagttggagtatacctttaccttcttatttggctttgtgatagtttaatttatatgtattttgagttctgacttgtatttctttgaattgattctagtttaagtaatcatggcctcctccgagaacgtcatcaccgagttcatgcgcttcaaggtgcgcatggagggcaccgtgaacggccacgagttcgagatcgagggcgagggcgagggccgcccctacgagggccacaacaccgtgaagctgaaggtgacgaagggcggccccctgcccttcgcctgggacatcctgtccccccagttccagtacggctccaaggtgtacgtgaagcaccccgccgacatccccgactacaagaagctgtccttccccgagggcttcaagtgggagcgcgtgatgaacttcgaggacggcggcgtggcgaccgtgacccaggactcctccctgcaggacggctgcttcatctacaaggtgaagttcatcggcgtgaacttcccctccgacggccccgtgatgcagaagaagaccatgggctgggaggcctccaccgagcgcctgtacccccgcgacggcgtgctgaagggcgagacccacaaggccctgaagctgaaggacggcggccactacctggtggagttcaagtccatctacatggccaagaagcccgtgcagctgcccggctactactacgtggacgccaagctggacatcacctcccacaacgaggactacaccatcgtggagcagtacgagcgcaccgagggccgccaccacctgttcctgtagttttgtgatctgatgataagtggttggttcgtgtctcatgcacttgggaggtgatctatttcacctggtgtagtttgtgtttccgtcagttggaaaaacttatccctatcgatttcgttttcattttctgcttttcttttatgtaccttcgtttgggcttgtaacgggcctttgtatttcaactctcaataataatccaagtgcatgttaaacaatttgtcatctgtttcggctttgatatactactggtgaagatgggccgtactactgcatcacaacgaaaaataataataagatgaaaaacttgaagtggaaaaaaaaaaaaacttgaatgttcactactactcattgaccataatgtttaacatacatagctcaatagtatttttgtgaatatggcaacacaaacagtccaaaacaattgtctcttactataccaaaccaagggcgccgcttgtttgccactctttgtgtgcaatagtgtgattaccacatctccacattcaatatattccctgaattatctgacgattttgatggctcactgttttcccaagtcttgaattgtcttctgtgcgccagtcaaatgcatatgtgttgagtttatcttttaaatatcaagcttttgtttttaacttttgtttgtaaccaaaaactcacagtaggagtttgatcacataattttatgtttgcctttgcaatttctagtgagtctttgattaaaagcttgaaaagaaaatgcagccaagcttaccaagtaagttatgtgtattaaccagaggaagagagaatcttgcaaaatttcaacaaacacaaaaagaagtattactacgattggtggagaaagaaaacgattccaaatcttgaactgttgttgtaaaagcatagcagaaagtgggagacaaccgaaatagaaatgactataacttaatttaatgttatcattataatttcttctagcaaatatttagaaagtaaatatcacatcaacctttaatgtaattaagctttctctttttgattcatgtgagatgaaaagaaaaaaaagaagagaaaagtgtagaaaacacatcatttctaagctgaagctgaggtacaaattaattaataagtgactagggtcacgtgaccctagtcacttatgattccgatgacttcgtaggttcctagctcaagccgctcgtgtccaagcgtcacttacgattagctaatgattacggcatctaggaccgactagttcttatgtgcttctagtctccaaatgtggttgatagttattttgctctaagatcaacagtaatgaagtataaatcatcgttgtggtgtgctactcggttaattgagcattaacacacacaaacatgacgaggatggtataatctccaaaaatgtgtactttgttaggtgggaccctatagccttgattaatgtgctatgttaggcatgcctggaaacgtgtgacgcatatgttttgtgaacctgttgatattatatgtgcttttatattaccatattttattaaaatactaatatttattactagtaagatataacattctatctagcttaaaaactaaccataaatattccataataactagatttaccaaactaatatactaaatatacataataaatacaaaattaacaagacaataatcaatatttatgagcttaatatatttagacattatggttggtcgacgataatcatgctaacttttcgtaattgcttgattgaaatatgcttagaataatgcctctttgttctacatggcaaatagggaccattatggtgtaacaccctgggaaccacaaacaccccgaaatgctactaaactacacaactaaccttcatatataaaatttcgacagcatctcctttgaaaatttgcatagacgtggaagcaacagagtataaacagatctagctagctaagtttaaacggccggccaaacgtgcaagcgctactagacaattcagtacattaaaaacgtccgcaatgtgttattaagttgtctaagcgtcaatttatttacaattgaatatatcctgcca

SEQ ID NO: 3 - DNA, 3847 bp, Artificial
  Synthetic construct comprising:  UBI1ZM PRO::UBI1ZM 5' UTR::UBI1ZM INTRON1:FRT1:CTP::SPCN::SB-UBI TERM
gtgcagcgtgacccggtcgtgcccctctctagagataatgagcattgcatgtctaagttataaaaaattaccacatattttttttgtcacacttgtttgaagtgcagtttatctatctttatacatatatttaaactttactctacgaataatataatctatagtactacaataatatcagtgttttagagaatcatataaatgaacagttagacatggtctaaaggacaattgagtattttgacaacaggactctacagttttatctttttagtgtgcatgtgttctcctttttttttgcaaatagcttcacctatataatacttcatccattttattagtacatccatttagggtttagggttaatggtttttatagactaatttttttagtacatctattttattctattttagcctctaaattaagaaaactaaaactctattttagtttttttatttaataatttagatataaaatagaataaaataaagtgactaaaaattaaacaaataccctttaagaaattaaaaaaactaaggaaacatttttcttgtttcgagtagataatgccagcctgttaaacgccgtcgacgagtctaacggacaccaaccagcgaaccagcagcgtcgcgtcgggccaagcgaagcagacggcacggcatctctgtcgctgcctctggacccctctcgagagttccgctccaccgttggacttgctccgctgtcggcatccagaaattgcgtggcggagcggcagacgtgagccggcacggcaggcggcctcctcctcctctcacggcaccggcagctacgggggattcctttcccaccgctccttcgctttcccttcctcgcccgccgtaataaatagacaccccctccacaccctctttccccaacctcgtgttgttcggagcgcacacacacacaaccagatctcccccaaatccacccgtcggcacctccgcttcaaggtacgccgctcgtcctcccccccccccctctctaccttctctagatcggcgttccggtccatgcatggttagggcccggtagttctacttctgttcatgtttgtgttagatccgtgtttgtgttagatccgtgctgctagcgttcgtacacggatgcgacctgtacgtcagacacgttctgattgctaacttgccagtgtttctctttggggaatcctgggatggctctagccgttccgcagacgggatcgatttcatgattttttttgtttcgttgcatagggtttggtttgcccttttcctttatttcaatatatgccgtgcacttgtttgtcgggtcatcttttcatgcttttttttgtcttggttgtgatgatgtggtctggttgggcggtcgttctagatcggagtagaattctgtttcaaactacctggtggatttattaattttggatctgtatgtgtgtgccatacatattcatagttacgaattgaagatgatggatggaaatatcgatctaggataggtatacatgttgatgcgggttttactgatgcatatacagagatgctttttgttcgcttggttgtgatgatgtggtgtggttgggcggtcgttcattcgttctagatcggagtagaatactgtttcaaactacctggtgtatttattaattttggaactgtatgtgtgtgtcatacatcttcatagttacgagtttaagatggatggaaatatcgatctaggataggtatacatgttgatgtgggttttactgatgcatatacatgatggcatatgcagcatctattcatatgctctaaccttgagtacctatctattataataaacaagtatgttttataattattttgatcttgatatacttggatgatggcatatgcagcagctatatgtggatttttttagccctgccttcatacgctatttatttgcttggtactgtttcttttgtcgatgctcaccctgttgtttggtgttacttctgcaggtcgactttaacttagcctaggaagttcctattccgaagttcctattctctagaaagtataggaacttcggatccagccatggctgcgaccactctcacgagcgctctcccaggagcctttagcagctctcagagaccttcggctccgttcaacctccagaggagccctagagtcctcagacgcttcaaccgcaagaccggtagacagccacgcggtctcgtgagagctgctaaggctcagatgcagaacctccccgagaagttcgatgaaacacgcctctgggaggcattgcgcggattcggagtctcccctagcagagtgacctacgccccagtcggattcggcgattaccactggaccgtcaccgacgaggacggtagaccctggttcgcaaccgtcagcgacctcgagcacaaggagcactgcggacaaggtgctcaagcagcactgaagggcctcagacaggcgatggacacagcactcgccttgagggacagagacggacttcgcttcgtcgtcgcacctgtggcagcaacagacggaggtggaccagtgcttccactggacgcaagatacgccctgacagtgttcccccacgtcccaggaagaacaggcgagttcggacaacgcctgaccgaagcagaacgcgatcgcctcctcgcattgcttgccgaactccacggacggactccaccagaaacaacccccccagcagacatggaacccccaggacttccaggagtcagagcagctctcgcggaaagcgaaggaccttggtccggaggaccctttgccgaaccagcacggcttctcttgagagaacacgaggcgaccctccacgcgagacttgctgaattcgaggccctggtcgcaagggtcaagggcagaggagcaccactggtcgttacacacggcgaaccgcatccaggcaacctcatcctgggagaagagggctacctgctcgtcgactgggacacagtgggattggctccagctgaacgcgacctcagcttgatcagcgacgatccagcggacctcgcgagatatgccgaactcacaggacggacgccagaccccgatgctcttgcactctacagactgcgctggagcctcctcgatgtggcagagttcgtcgagtggttcagagccgagcaccagagaacccaggacaccgagagcgcatggaagggcttcacagacacactgggccagttggcagctgggggttctgctgcgtagttcgaactggccagctaagcggtaccgttaacgccgtgggtcgtttaagctgccgctgtacctgtgtcgtctggtgccttctggtgtacctgggaggttgtcgtctatcaagtatctgtggttggtgtcatgagtcagtgagtcccaatactgttcgtgtcctgtgtgcattatacccaaaactgttatgggcaaatcatgaataagctagatgttctaacttaaaagtctctgctcaatatggtatttaggttgtttttgttcgtctcctaatatttgcctgggatcaaattttattggctggtgttcatttgacctccttgttcttgctaggctccattttttactctacagccataatatgtttgattgtttggtttgttctttgttgtacacctggttctgtcgagcttagttttcgacactggcttacagctttagatgttgctattttattgggttctgattgctattttattgggttctgattgctagtttttgctgaatccaaaaaccatgttatttatttaagcgatccaggttattattatgatggtggctaagtttttttttttccaagggtaaattttctggattctccagtgtttctgtggcc

SEQ ID NO: 4 - DNA, 4095 bp, Artificial
  Synthetic construct comprising:  ZM-PLTP PRO::ZM-PLTP 5' UTR::ZM-ODP2::OS-T28 TERM
ccctagctccctgcggctgttacgcggtcccccatcaatcttctgttcttgcggttgtagcctgtgtaacagtgctagagtatgtatgataaataggttttaagtctgcttacatgacattttttattgtggaagagacatataaaaattagagagagtggttctcatgcaacggcggacggcccggtgctaaaagagcttcaagacaaaataatgaaacaggaagagagtagatttatctaagagccaactttattatatgaatgtgtttattgttggctttagatgatatggtaaggagttagagctaataatagataggctctattattattattattaattaaactcgctctaaggaggaaagtgggaggaagggacgaggacgaagactactggaagcatcgtgcatggatgatggatgtggtgtctcttaatgtaggtggccggaggatgtacgtgttaattgcgcgataagcactcagatccaaccgcaaactacctccacactgacacactgatagagagaaagagagacctccgacgactgccgccgcagatgagccacgtacgtatacgacgtctgccggccggctcaggctgccgccatcaccctgctcgaaagtcgcgttaggcggcgccagctacataggagtatctagtctagccagttagtatactactactgcgctgatgatgaattaactctgcatagatactgtacttgcctccctccaacacccaaccacctcctgctcggctcttaataacttggacacggatcgatgccatccaaggaagaacacgacgacgacgacggaacatccaccatgcaagcttgcatccatacgccgatacgcgtgcatccatccatccaccattatttccattttccaccgatcacacgtacacaggcctatttaaggagcgacatcccactgcaactctcctcaccactcatcaccagctagctctagcaaagcacttgccatctaccgaccgccgcattccaaacagcccgacgagctagcagagcggcaggcacctccctcctcaaggaacccatggccactgtgaacaactggctcgctttctccctctccccgcaggagctgccgccctcccagacgacggactccacactcatctcggccgccaccgccgaccatgtctccggcgatgtctgcttcaacatcccccaagattggagcatgaggggatcagagctttcggcgctcgtcgcggagccgaagctggaggacttcctcggcggcatctccttctccgagcagcatcacaaggccaactgcaacatgatacccagcactagcagcacagtttgctacgcgagctcaggtgctagcaccggctaccatcaccagctgtaccaccagcccaccagctcagcgctccacttcgcggactccgtaatggtggcttcctcggccggtgtccacgacggcggtgccatgctcagcgcggccgccgctaacggtgtcgctggcgctgccagtgccaacggcggcggcatcgggctgtccatgattaagaactggctgcggagccaaccggcgcccatgcagccgagggtggcggcggctgagggcgcgcaggggctctctttgtccatgaacatggcggggacgacccaaggcgctgctggcatgccacttctcgctggagagcgcgcacgggcgcccgagagtgtatcgacgtcagcacagggtggagccgtcgtcgtcacggcgccgaaggaggatagcggtggcagcggtgttgccggcgctctagtagccgtgagcacggacacgggtggcagcggcggcgcgtcggctgacaacacggcaaggaagacggtggacacgttcgggcagcgcacgtcgatttaccgtggcgtgacaaggcatagatggactgggagatatgaggcacatctttgggataacagttgcagaagggaagggcaaactcgtaagggtcgtcaagtctatttaggtggctatgataaagaggagaaagctgctagggcttatgatcttgctgctctgaagtactggggtgccacaacaacaacaaattttccagtgagtaactacgaaaaggagctcgaggacatgaagcacatgacaaggcaggagtttgtagcgtctctgagaaggaagagcagtggtttctccagaggtgcatccatttacaggggagtgactaggcatcaccaacatggaagatggcaagcacggattggacgagttgcagggaacaaggatctttacttgggcaccttcagcacccaggaggaggcagcggaggcgtacgacatcgcggcgatcaagttccgcggcctcaacgccgtcaccaacttcgacatgagccgctacgacgtgaagagcatcctggacagcagcgccctccccatcggcagcgccgccaagcgcctcaaggaggccgaggccgcagcgtccgcgcagcaccaccacgccggcgtggtgagctacgacgtcggccgcatcgcctcgcagctcggcgacggcggagccctggcggcggcgtacggcgcgcactaccacggcgccgcctggccgaccatcgcgttccagccgggcgccgccagcacaggcctgtaccacccgtacgcgcagcagccaatgcgcggcggcgggtggtgcaagcaggagcaggaccacgcggtgatcgcggccgcgcacagcctgcaggacctccaccacctgaacctgggcgcggccggcgcgcacgactttttctcggcagggcagcaggccgccgccgctgcgatgcacggcctgggtagcatcgacagtgcgtcgctcgagcacagcaccggctccaactccgtcgtctacaacggcggggtcggcgacagcaacggcgccagcgccgtcggcggcagtggcggtggctacatgatgccgatgagcgctgccggagcaaccactacatcggcaatggtgagccacgagcaggtgcatgcacgggcctacgacgaagccaagcaggctgctcagatggggtacgagagctacctggtgaacgcggagaacaatggtggcggaaggatgtctgcatgggggactgtcgtgtctgcagccgcggcggcagcagcaagcagcaacgacaacatggccgccgacgtcgggcatggcggcgcgcagctcttcagtgtctggaacgacacttaagcgtacctagtggtacctgacatcttatagtctgcaacctctcgtgtctgaattcctatctttatcaagtgttattgcttccacgactataggacagctttcgtcgaaagcttttgctcatgtgatctcgaaggattcatctagtctgatttttcgtgacttgtatcggttttattggattcatccaacatatatcaataaaaaatgagttgtgtttcctttcttcctagttcagttaaaattatttccctcctgcgcttgtgctgtaattgtctgtgtacctgttgtttgtgactgtgttagttcccttggatatgatttcgtatttgatatgtacatggagatagcttagcttcattattggagtatgaagttagtatgacatagtcactctcctggaaaattgacactgcaaaccatatttttattctgaaccacaaatcctagtcagtccgctggcatatgccgtccgtttgctgaatccagaacgtgggtttggagatgtacggctgagatgcctctatgcgaaggggatttcgtggtgaaacgagatgggagtagagcaacgcccgtggaagatgcttcaaacttccacacttttgagcaacgatcggcagtagtaaggtagacgatttcaagatcaaagcatatgaagataaacaacatcaacaacaaaatttgttggggttctatagagagaaacagagctacatacatacactgttttgtatctaccatctgagatgatgaaaagatgaaaaactaaagaatgccccggcgccaacgccaggacacgccgcgcgcgcgtcacccgagccatctcttgacccagccggcgctgtatatttacacacgttgcagcatcgatcaccacctgttcgatcgcgtcgccgtcacc

SEQ ID NO: 5 - DNA, 2790 bp, Artificial
  Synthetic construct comprising:  ZM-AXIG1 PRO::ZM-WUS2::IN2-1 TERM
aggcgacccatcgctgctttgtctacatcatgttcttcatcatcctccccaggcgacgcgtgctgctgttcttattcagactaccgttcgagtgactgcatggcgtacatctttctgcatcgactttgtacggctacatcgaacatatacacgagatgtctcgtgtgaatagagtcactaatgccttaagcatcggttactccgtagggtacattctgttcttcttatttgtgcatatttttattgttgtttactgattatacgagtagttatacatacatgcacatacatatcatcacatatatcacaatatttttctaaattaaattaaaactaaaaatgactaaatttctaacaccaacgacattgtaatgttttctccaacaactttacctattctacattgttctatttcgaatttcactctataaacaacatagtctacaatggaaaacagtgctttgtacgactatatacgcgatgtgtggctacaacataagacaatatagtcgtttgaagattgaacctatatatcggtacggttaatccgtctatgtacgtgggcatgacgaacacccgtgataacgaaggattaacgtgcacaatcataaatccaaagtaggagcggtgcatgatgagaatcgctctcagtactcgacataatgaaccttacgaggtacaacaggcaggcaggcagggaccaggggccgcctttatttcaggctcgctggccccacgggcgtgctgcgtgcacgaagggcactaccccaacctctcaccgaaaaccgcgctggatcggcaaatcaaacgaggtggtgccccgtgcccactctccacgtccacggcaccatccctctgcagccgctcaccagccatgccgtgtcgcggaacggcacaaccacccccaacccactcacgaaaccccgtcccggccgtgcccgtgtcggtccgcgctcggcaacgaggcggcccgcgctgctgagtcccctggacacccgacaccctgtcggccctttgtttattcatcccgaaatctcatctgcccccacggccgactgcgctgcgccgcccggatatatatacccatcgttatcgatcgatcgatcgcgtcactcacgggtagctcatggtcgagcgtagcatgcaggaacttatttgccgtgcgctcccaggtctccgctcgcgtgccttccagtctgtctcacactagctgctgtgggacgatcgaagtgggtgtgtcagctagctagctgcgccgtgaccacgcacatgaccgcagtgcgcgcggggctgatcaagggaaagtgatcccatggcggccaatgcgggcggcggtggagcgggaggaggcagcggcagcggcagcgtggctgcgccggcggtgtgccgccccagcggctcgcggtggacgccgacgccggagcagatcaggatgctgaaggagctctactacggctgcggcatccggtcgcccagctcggagcagatccagcgcatcaccgccatgctgcggcagcacggcaagatcgagggcaagaacgtcttctactggttccagaaccacaaggcccgcgagcgccagaagcgccgcctcaccagcctcgacgtcaacgtgcccgccgccggcgcggccgacgccaccaccagccaactcggcgtcctctcgctgtcgtcgccgccgccttcaggcgcggcgcctccctcgcccaccctcggcttctacgccgccggcaatggcggcggatcggctgtgctgctggacacgagttccgactggggcagcagcggcgctgctatggccaccgagacatgcttcctgcaggactacatgggcgtgacggacacgggcagctcgtcgcagtggccacgcttctcgtcgtcggacacgataatggcggcggccgcggcgcgggcggcgacgacgcgggcgcccgagacgctccctctcttcccgacctgcggcgacgacggcggcagcggtagcagcagctacttgccgttctggggtgccgcgtccacaactgccggcgccacttcttccgttgcgatccaacagcaacaccagctgcaggagcagtacagcttttacagcaacagcaacagcacccagctggccggcaccggcaaccaagacgtatcggcaacagcagcagcagccgccgccctggagctgagcctcagctcatggtgctccccttaccctgctgcagggagtatgtgagagcaacgcgagctgccactgctcttcactgatgtctctggaatggaaggaggaggaagtgagaacagatcattcgacaaagcagcattagtccgttgatcggtggaagaccactcgtcagtgttgagttgaatgtttgatcaataaaatacggcaatgctgtaagggttgttttttatgccattgataatacactgtactgttcagttgttgaactctatttcttagccatgccaagtgcttttcttattttgaataacattacagcaaaaagttgaaagacaaaaaaaaaaacccccgaacagagtgctttgggtcccaagcttctttagactgtgttcggcgttccccctaaatttctccccctatatctcactcacttgtcacatcagcgttctctttccccctatatctccacgctctacagcagttccacctatatcaaacctctataccccaccacaacaatattatatactttcatcttcaactaactcatgtaccttccaatttttttctactaataattatttacgtgcacagaaacttagcaaggagagagagagcgg

SEQ ID NO: 6 - DNA, 11210 bp, Artificial
  Synthetic construct comprising the T-DNA (RB to LB):  RB + CAMV35S PRO (PHI)-V5::HA-WUS-V1::OS-T28 TERM (MOD1) + GM-UBQ PRO::GM-UBQ 5' UTR::GM-UBQ INTRON1::ZS-YELLOW1 N1::NOS TERM + AT-UBIQ10 PRO::AT-UBIQ10 5' UTR::AT-UBIQ10
aattacaacggtatatatcctgtcagccaacaccaaaacatcaaaaaaatcgggatcaggatcaggatctgcggccgcatcctgcaggagctcaaacgagcaggaagcaacgagagggtggcgcgcgaccgacgtgcgtacgtagcatgagcctgagtggagacgttggacgtgtatgtatatacctctctgcgtgttaactatgtacgtaagcggcaggcagtgcaataagtgtggctctgtagtatgtacgtgcgggtacgatgctgtaagctactgaggcaagtccataaataaataatgacacgtgcgtgttctataatctcttcgcttcttcatttgtccccttgcggagtttggcatccattgatgccgttacgctgagaacagacacagcagacgaaccaaaagtgagttcttgtatgaaactatgacccttcatcgctaggctcaaacagcaccccgtacgaacacagcaaattagtcatctaactattagcccctacatgtttcagacgatacataaatatagcccatccttagcaattagctattggccctgcccatcccaagcaatgatctcgaagtatttttaatatatagtatttttaatatgtagcttttaaaattagaagataattttgagacaaaaatctccaagtatttttttgggtattttttactgcctccgtttttctttatttctcgtcacctagtttaattttgtgctaatcggctataaacgaaacagagagaaaagttactctaaaagcaactccaacagattagatataaatcttatatcctgcctagagctgttaaaaagatagacaactttagtggattagtgtatgcaacaaactctccaaatttaagtatcccaactacccaacgcatatcgttcccttttcattggcgcacgaactttcacctgctatagccgacgtacatgttcgttttttttgggcggcgcttactttcttccccgttcgttctcagcatcgcaactcaatttgttatggcggagaagcccttgtatcccaggtagtaatgcacagatatgcattattattattcataaaacgaacgctcttcaactggaagagcggttactaccggttcactagctagctgctaatcgagctagttaccctatgaggtgacatgaagcgctcacggttactatgacggttagcttcacgactgttggtggcagtagcgtacgacttagctatagttccggacttacctagctaggttaccagagctggtcaccttcttcatcgctaagaagacactcagtagtccggaccgatatcgctatcaactttgtatagaaaagttgggccagaatggcccggaccgggttaccaagcggccgcgaattccagaagaccaaagggcaattgagacttttcaacaaagggtaatatcgggaaacctcctcggattccattgcccagctatctgtcacttcatcaaaaggacagtagaaaaggaaggtggcacctacaaatgccatcattgcgataaaggaaaggctatcgttcaagatgcctctgccgacagtggtcccaaagatggacccccacccacgaggagcatcgtggaaaaagaagacgttccaaccacgtcttcaaagcaagtggattgatgtgatatctccactgacgtaagggatgacgcacaatcccactatccttcgcaagacccttcctctatataaggaagttcatttcatttggagaggacccatggaaactcaacaacaacaagcagatattcaagattttgggaacaaaaacagtaacacctatgcatgcaggcaaagcagtactaggtggacacccacaagtgatcagatcagaatactgaaagagctctactacaacaatggaatcagatcaccaactgctgatcagattcagagaatcgctgctcaactcagacagtacggcaagattgaaggcaagaacgtgttttattggtttcagaaccataaagctcgtgaacgccagaagaaacggttcactcctactgctcctccaccaccgtctcacttctccgatcatattaaccaccatcttcccaacgctgcccccatgcagattccgtctcaccaccaccactaccaccatcaagaaccaccacatgtctatgctcaccctcacaaactctacaccactcatcacattggggttggttcttcttcacaaggagtgatgggtgtagggtgtggctatggatctgttgctatggagaagagtttcaggaagtgttcaatatcaccaccgggagagagtaaggccacaggaggaattggccggaatatcggttcaagatcacggataagtgtcgattcgtgttccttcttcgacacaattaagccaaagacatatgagatgtttgagaatcatgatcaagatgaagaacaaggagagccttcaactgagatcgaaacacttccattattcccgattcacgacggcaaccatcatgatttcttcggcatgaggacggcaaatctgcaattggagcaaggcactggaggttactacactggaggaagctggtatcggtctgatgagagggcgtctcttgagctcagtctcaactcatatggttattataactaattcgaactggccaggtacctgacatcttatagtctgcaacctctcgtgtctgaattcctatctttatcaagtgttattgcttccacgactataggacagctttcgtcgaaaggttttgctcatgtgatctcgaaggattcatctagtctgatttttcgtgacttgtatcggttttattggattcatccaacatatatcaataaaaaatgagttgtgtttcctttcttcctagttcagttaaaattatttccctcctgcgcttgtgctgtaattgtctgtgtacctgttgtttgtgactgtgttagttcccttggatatgatttcgtatttgatatgtacatggagatagcttagcttcattattggagtatgaagttagtatgacatagtcactctcctggaaaattgacactgcaaaccatatttttattctgaaccacaaatcctagtcagtccgctggcatatgccgtccgtttgctgaatccagaacgtgggtttggagatgtacggctgagatgcctctatgcgaaggggatttcgtggtgaaacgagatgggagtagagcaacgcccgtggaagatgcttcaaacttccacacttttgagcaacgatcggcagtagtaaggtagacgatttcaagatcaaagcatatgaagataaacaacatcaacaacaaaatttgttggggttctatagagagaaacagagctacatacatacactgttttgtatctaccatctgagatgatgaaaagatgaaaaactaaagaatgccccggcgccaacgccaggacacgccgcgcgcgcgtcacccgagccatctcttgacccagccggcgctgtatatttacacacgttgcagcatcgatcaccacctgttcgatcgcgtcgccgtcaccaagcttggcgcgccggtcacccggtccgggcctagaaggccacccggggctcggcgttaggcttttagtccgctaggtggctagaccgaggttaggacgctagttcactaggggcctagtggtgttttaaggatgggcaagtttgtacaaaaaagcaggctggcgccggaaccaattcagtcgagtgcggccgccagtgtgatggatatctcgacccgggtgattgcggttacatcatgtacggaaaaataattctaatccttgatttaaatttgaacttgactatttatttattctttatttcattttgtaaatcattttatgtatctcctggcaagcaattttatccaccttgcaccaacaccttcgggttccataatcaaaccaccttaacttcacaccatgctgtaactcacaccgcccagcatctccaatgtgaaagaagctaaaatttaataaacaatcatacgaagcagtgacaaaataccagatggtattaatgcttcgataaaattaattggaaagtataaaatggtagaaaataataaattataattaatttaagtaagataaaaaataattaaaaactaaaatgttaaaattttaaaaaaattattttaaataatatttaaaaacattaaaaatcattttaaaaaatttatttatagaacaattaaataaatatttcagctaataaaaaacaaaagcttacctagccttagaagacaacttgtccaacaattagatgatacccattgcccttacgttttctttaacatcaattattgtttttgtcaacaagctatcttttagttttattttattggtaaaaaatatgtcgccttcaagttgcatcatttaacacatctcgtcattagaaaaataaaactcttccctaaacgattagtagaaaaaatcattcgataataaataagaaagaaaaattagaaaaaaataacttcattttaaaaaaatcattaaggctatattttttaaatgactaattttatatagactgtaactaaaagtatacaatttattatgctatgtatcttaaagaattacttataaaaatctacggaagaatatcttacaaagtgaaaaacaaatgagaaagaatttagtgggatgattatgattttatttgaaaattgaaaaaataattattaaagactttagtggagtaagaaagctttcctattagtcttttcttatccataaaaaaaaaaaaaaaaatctagcgtgacagcttttccatagattttaataatgtaaaatactggtagcagccgaccgttcaggtaatggacactgtggtcctaacttgcaacgggtgcgggcccaatttaataacgccgtggtaacggataaagccaagcgtgaagcggtgaaggtacatctctgactccgtcaagattacgaaaccgtcaactacgaaggactccccgaaatatcatctgtgtcataaacaccaagtcacaccatacatgggcacgcgtcacaatatgattggagaacggttccaccgcatatgctataaaatgcccccacacccctcgaccctaatcgcacttcaattgcaatcaaattagttcattctctttgcgcagttccctacctctcctttcaaggttcgtagatttcttccgtttttttttcttcttctttattgtttgttctacatcagcatgatgttgatttgattgtgttttctatcgtttcatcgattataaattttcataatcagaagattcagcttttattaatgcaagaacgtccttaattgatgattttataaccgtaaattaggtctaattagagtttttttcataaagattttcagatccgtttacaacaagccttaattgttgattctgtagtcgtagattaaggtttttttcatgaactacttcagatccgttaaacaacagccttatttgttgatacttcagtcgtttttcaagaaattgttcagatccgttgataaaagccttattcgttgattctgtatggtatttcaagagatattgctcaggtcctttagcaactaccttatttgttgattctgtggccatagattaggattttttttcacgaaattgcttcttgaaattacgtgatggattttgattctgatttatcttgtgattgttgactctacagccatggcccacagcaagcacggcctgaaggaggagatgaccatgaagtaccacatggagggctgcgtgaacggccacaagttcgtgatcaccggcgagggcatcggctaccccttcaagggcaagcagaccatcaacctgtgcgtgatcgagggcggccccctgcccttcagcgaggacatcctgagcgccggcttcaagtacggcgaccggatcttcaccgagtacccccaggacatcgtggactacttcaagaacagctgccccgccggctacacctggggccggagcttcctgttcgaggacggcgccgtgtgcatctgtaacgtggacatcaccgtgagcgtgaaggagaactgcatctaccacaagagcatcttcaacggcgtgaacttccccgccgacggccccgtgatgaagaagatgaccaccaactgggaggccagctgcgagaagatcatgcccgtgcctaagcagggcatcctgaagggcgacgtgagcatgtacctgctgctgaaggacggcggccggtaccggtgccagttcgacaccgtgtacaaggccaagagcgtgcccagcaagatgcccgagtggcacttcatccagcacaagctgctgcgggaggaccggagcgacgccaagaaccagaagtggcagctgaccgagcacgccatcgccttccccagcgccctggcctgagagctcgaatttccccgatcgttcaaacatttggcaataaagtttcttaagattgaatcctgttgccggtcttgcgatgattatcatataatttctgttgaattacgttaagcatgtaataattaacatgtaatgcatgacgttatttatgagatgggtttttatgattagagtcccgcaattatacatttaatacgcgatagaaaacaaaatatagcgcgcaaactaggataaattatcgcgcgcggtgtcatctatgttactagatcgggaattctagtggccggcccagctgatatctagacccagctttcttgtacaaagtggccgttaacggatctggccgcggccgcatcaggatattcttgtttaagatgttgaactctatggaggtttgtatgaactgatgatctaggaccggataagttcccttcttcatagcgaacttattcaaagaatgttttgtgtatcattcttgttacattgttattaatgaaaaaatattattggtcattggactgaacacgagtgttaaatatggaccaggccccaaataagatccattgatatatgaattaaataacaagaataaatcgagtcaccaaaccacttgccttttttaacgagacttgttcaccaacttgatacaaaagtcattatcctatgcaaatcaataatcatacaaaaatatccaataacactaaaaaattaaaagaaatggataatttcacaatatgttatacgataaagaagttacttttccaagaaattcactgattttataagcccacttgcattagataaatggcaaaaaaaaacaaaaaggaaaagaaataaagcacgaagaattctagaaaatacgaaatacgcttcaatgcagtgggacccacggttcaattattgccaattttcagctccaccgtatatttaaaaaataaaacgataatgctaaaaaaatataaatcgtaacgatcgttaaatctcaacggctggatcttatgacgaccgttagaaattgtggttgtcgacgagtcagtaataaacggcgtcaaagtggttgcagccggcacacacgagtcgtgtttatcaactcaaagcacaaatacttttcctcaacctaaaaataaggcaattagccaaaaacaactttgcgtgtaaacaacgctcaatacacgtgtcattttattattagctattgcttcaccgccttagctttctcgtgacctagtcgtcctcgtcttttcttcttcttcttctataaaacaatacccaaagagctcttcttcttcacaattcagatttcaatttctcaaaatcttaaaaactttctctcaattctctctaccgtgatcaaggtaaatttctgtgttccttattctctcaaaatcttcgattttgttttcgttcgatcccaatttcgtatatgttctttggtttagattctgttaatcttagatcgaagacgattttctgggtttgatcgttagatatcatcttaattctcgattagggtttcatagatatcatccgatttgttcaaataatttgagttttgtcgaataattactcttcgatttgtgatttctatctagatctggtgttagtttctagtttgtgcgatcgaatttgtcgattaatctgagtttttctgattaacagccatggctgcaactactcttacatctgctttacctggtgctttcagttcatcccagagaccaagtgctcctttcaacttacaaagatcacctagagtgcttagaaggttcaacagaaagacaggacgtcaacctcgtggacttgttcgtgctgcaaaggctcaagcggcgcaaaacctgccagagaaattcgatgaaacaagactctgggaggccctcaggggatttggggttagtccaagtagggttacttacgctcccgtcggattcggagattaccactggaccgtcacagatgaagacgggagaccttggttcgcaactgtcagtgacctcgaacacaaagagcattgcgggcagggagcacaagcagcccttaaaggactcagacaagctatggacactgccctcgcacttagagatagggacggactcagattcgtggttgctccagtggcagcaacagatgggggtggccctgtccttccccttgacgctaggtatgcactcacagtcttccctcacgtcccaggaagaacaggagagttcggacaaagactcacagaggcagagagggacagactgcttgctcttctggcagaactccacggaagaacacctcctgaaacaaccccaccagccgatatggaaccaccaggacttcctggtgttagagcagcactcgccgaaagtgaaggaccttggagtggaggaccatttgcagaacccgctagacttcttctcagagaacacgaggccacactgcacgcaagactcgctgaattcgaagccctcgtcgcaagagttaagggtcgtggagcacctcttgtcgttacccacggagaaccacacccaggcaacttgatcctcggagaggaaggctatctcctcgtggactgggatacagttggactggctccagctgaaagggatttgagtctcatctcagacgacccagctgacctcgcaagatacgcagagcttacaggaagaactccagacccagacgcactcgcactctatagactgcgttggagtctccttgatgtggctgagttcgtcgagtggttcagggctgaacaccaaagaacccaagacaccgagagtgcatggaaggggttcactgacacacttgggcaattggctgctggtggatcagctgcatagcctaggaaacttatctctgttatgaatcagaagaagttcatgtctcgtttcatttaaaactttggtggtttgtgttttggggccttgtaaagcccctgatgaataattgttcaactatgtttccgttcctgtgttatacctttctttctaatgagtaatgacatcaaacttcttctgtattgaaattatgtccttgtgagtctctttatcatcgtttcgtctttacattatatgtgctacttttgtctaatgagcctgaaaagtggctccaatggtacgcactggaagatttgttggcttctggtagatatagcgacagtgttgagcttgtaatatcatgtctcttattgctaaattagttcctttcttaacagaaaccttcaaagtttttgtttttgttttcatttacctaatgtacacatacgctggccatgactaacaacatgtccaggcttagagcatatttttttctagcttaaattgttaacttgtcattcagtaaaatccgagaattgtgaagctctaattgaagctaattcgttttataaagtcagttaaaaagtatactaaattatccaacttttcttcaaaatctcaaaattctatgacaaaacgatagtctttgtttatgtcagtaccacaaagaggtggaaaaaaacaccaaaaaaacaataagcaaactatacactgagaagaaaaataaaagagagctcaatagatgttttatactaacggtagattagatcaaagatccaagctttactctacatagagcagaacccagaatcccttcatatctcttttattctagcaccgataatctactgaaaagaagacacttagagctctgtctctttgtcaaagaagtcccagccgtcatccagaagctccttacgttcattaacagaggtaccggcggccgcgggcaactttattatacaaagttgatagatatcggtccgacggccagaatggccatctggattcagcaggcctagaaggccatttagtcctagcgatcgcgctgacaagcggtatttaaatcatcattctaggcgcgccacttacgcttgattccgatgacttcgtaggttcctagctcaagccgctcgtgtccaagcgtcacttacgattagctaatgattacggcatctaggaccgactagttcttatgtgcttctagtctccaaatgtggttgatagttattttgctctaagatcaacagtaatgaagtataaatcatcgttgtggtgtgctactcggttaattgagcattaacacacacaaacatgacgaggatggtataatctccaaaaatgtgtactttgttaggtgggaccctatagccttgattaatgtgctatgttaggcatgcctggaaacgtgtgacgcatatgttttgtgaacctgttgatattatatgtgcttttatattaccatattttattaaaatactaatatttattactagtaagatataacattctatctagcttaaaaactaaccataaatattccataataactagatttaccaaactaatatactaaatatacataataaatacaaaattaacaagacaataatcaatatttatgagcttaatatatttagacattatggttggtcgacgataatcatgctaacttttcgtaattgcttgattgaaatatgcttagaataatgcctctttgttctacatggcaaatagggaccattatggtgtaacaccctgggaaccacaaacaccccgaaatgctactaaactacacaactaaccttcatatataaaatttcgacagcatctcctttgaaaatttgcatagacgtggaagcaacagagtataaacagatctagctagctaagtttaaacggccggccaaacgtgcaagcgctactagacaattcagtacattaaaaacgtccgcaatgtgttattaagttgtctaagcgtcaatttatttacaattgaatatatcctgcca

SEQ ID NO: 7 - DNA, 9783 bp, Artificial
  Synthetic construct comprising the T-DNA (RB to LB):  RB + UBQ14 TERM::SPCN::CTP::AT-UBIQ10 INTRON1::AT-UBIQ10 5' UTR::AT-UBIQ10 PRO + UBQ3 TERM::TAGRFP::GM-UBQ INTRON1::GM-UBQ 5' UTR::GM-UBQ PRO-V1 + LB
aattacaacggtatatatcctgtcagccaacaccaaaacatcaaaaaaatcgggatcaggatcaggatctgcggccgcatcctgcaggtttaaacggccggccttcactagctagctgctaagctcaaacgagcaggaagcaacgagagggtggcgcgcgaccgacgtgcgtacgtagcatgagcctgagtggagacgttggacgtgtatgtatatacctctctgcgtgttaactatgtacgtaagcggcaggcagtgcaataagtgtggctctgtagtatgtacgtgcgggtacgatgctgtaagctactgaggcaagtccataaataaataatgacacgtgcgtgttctataatctcttcgcttcttcatttgtccccttgcggagtttggcatccattgatgccgttacgctgagaacagacacagcagacgaaccaaaagtgagttcttgtatgaaactatgacccttcatcgctaggctcaaacagcaccccgtacgaacacagcaaattagtcatctaactattagcccctacatgtttcagacgatacataaatatagcccatccttagcaattagctattggccctgcccatcccaagcaatgatctcgaagtatttttaatatatagtatttttaatatgtagcttttaaaattagaagataattttgagacaaaaatctccaagtatttttttgggtattttttactgcctccgtttttctttatttctcgtcacctagtttaattttgtgctaatcggctataaacgaaacagagagaaaagttactctaaaagcaactccaacagattagatataaatcttatatcctgcctagagctgttaaaaagatagacaactttagtggattagtgtatgcaacaaactctccaaatttaagtatcccaactacccaacgcatatcgttcccttttcattggcgcacgaactttcacctgctatagccgacgtacatgttcgttttttttgggcggcgcttactttcttccccgttcgttctcagcatcgcaactcaatttgttatggcggagaagcccttgtatcccaggtagtaatgcacagatatgcattattattattcataaaatcgagctagttaccctatgaggtgacatgaagcgctcacggttactatgacggttagcttcacgactgttggtggcagtagcgtacgacttagctatagttccggacttacctaactgactagagtcacacttagctgaccctagtcacttaggcgcgccgtcgacggatccgtaccatcaactttgtataataaagttgcccgcggccgccggtacctctgttaatgaacgtaaggagcttctggatgacggctgggacttctttgacaaagagacagagctctaagtgtcttcttttcagtagattatcggtgctagaataaaagagatatgaagggattctgggttctgctctatgtagagtaaagcttggatctttgatctaatctaccgttagtataaaacatctattgagctctcttttatttttcttctcagtgtatagtttgcttattgtttttttggtgtttttttccacctctttgtggtactgacataaacaaagactatcgttttgtcatagaattttgagattttgaagaaaagttggataatttagtatactttttaactgactttataaaacgaattagcttcaattagagcttcacaattctcggattttactgaatgacaagttaacaatttaagctagaaaaaaatatgctctaagcctggacatgttgttagtcatggccagcgtatgtgtacattaggtaaatgaaaacaaaaacaaaaactttgaaggtttctgttaagaaaggaactaatttagcaataagagacatgatattacaagctcaacactgtcgctatatctaccagaagccaacaaatcttccagtgcgtaccattggagccacttttcaggctcattagacaaaagtagcacatataatgtaaagacgaaacgatgataaagagactcacaaggacataatttcaatacagaagaagtttgatgtcattactcattagaaagaaaggtataacacaggaacggaaacatagttgaacaattattcatcaggggctttacaaggccccaaaacacaaaccaccaaagttttaaatgaaacgagacatgaacttcttctgattcataacagagataagtttcctaggctatgcagctgatccaccagcagccaattgcccaagtgtgtcagtgaaccccttccatgcactctcggtgtcttgggttctttggtgttcagccctgaaccactcgacgaactcagccacatcaaggagactccaacgcagtctatagagtgcgagtgcgtctgggtctggagttcttcctgtaagctctgcgtatcttgcgaggtcagctgggtcgtctgagatgagactcaaatccctttcagctggagccagtccaactgtatcccagtccacgaggagatagccttcctctccgaggatcaagttgcctgggtgtggttctccgtgggtaacgacaagaggtgctccacgacccttaactcttgcgacgagggcttcgaattcagcgagtcttgcgtgcagtgtggcctcgtgttctctgagaagaagtctagcgggttctgcaaatggtcctccactccaaggtccttcactttcggcgagtgctgctctaacaccaggaagtcctggtggttccatatcggctggtggggttgtttcaggaggtgttcttccgtggagttctgccagaagagcaagcagtctgtccctctctgcctctgtgagtctttgtccgaactctcctgttcttcctgggacgtgagggaagactgtgagtgcatacctagcgtcaaggggaaggacagggccacccccatctgttgctgccactggagcaaccacgaatctgagtccgtccctatctctaagtgcgagggcagtgtccatagcttgtctgagtcctttaagggctgcttgtgctccctgcccgcaatgctctttgtgttcgaggtcactgacagttgcgaaccaaggtctcccgtcttcatctgtgacggtccagtggtaatctccgaatccgacgggagcgtaagtaaccctacttggactaaccccaaatcccctgagggcctcccagagtcttgtttcatcgaatttctctggcaggttttgcgccgcttgagcctttgcagcacgaacaagtccacgaggttgacgtcctgtctttctgttgaaccttctaagcactctaggtgatctttgtaagttgaaaggagcacttggtctctgggatgaactgaaagcaccaggtaaagcagatgtaagagtagttgcagccatggctgttaatcagaaaaactcagattaatcgacaaattcgatcgcacaaactagaaactaacaccagatctagatagaaatcacaaatcgaagagtaattattcgacaaaactcaaattatttgaacaaatcggatgatatctatgaaaccctaatcgagaattaagatgatatctaacgatcaaacccagaaaatcgtcttcgatctaagattaacagaatctaaaccaaagaacatatacgaaattgggatcgaacgaaaacaaaatcgaagattttgagagaataaggaacacagaaatttaccttgatcacggtagagagaattgagagaaagtttttaagattttgagaaattgaaatctgaattgtgaagaagaagagctctttgggtattgttttatagaagaagaagaagaaaagacgaggacgactaggtcacgagaaagctaaggcggtgaagcaatagctaataataaaatgacacgtgtattgagcgttgtttacacgcaaagttgtttttggctaattgccttatttttaggttgaggaaaagtatttgtgctttgagttgataaacacgactcgtgtgtgccggctgcaaccactttgacgccgtttattactgactcgtcgacaaccacaatttctaacggtcgtcataagatccagccgttgagatttaacgatcgttacgatttatatttttttagcattatcgttttattttttaaatatacggtggagctgaaaattggcaataattgaaccgtgggtcccactgcattgaagcgtatttcgtattttctagaattcttcgtgctttatttcttttcctttttgtttttttttgccatttatctaatgcaagtgggcttataaaatcagtgaatttcttggaaaagtaacttctttatcgtataacatattgtgaaattatccatttcttttaattttttagtgttattggatatttttgtatgattattgatttgcataggataatgacttttgtatcaagttggtgaacaagtctcgttaaaaaaggcaagtggtttggtgactcgatttattcttgttatttaattcatatatcaatggatcttatttggggcctggtccatatttaacactcgtgttcagtccaatgaccaataatattttttcattaataacaatgtaacaagaatgatacacaaaacattctttgaataagttcgctatgaagaagggaacttatccggtcctagatcatcagttcatacaaacctccatagagttcaacatcttaaacaagaatatcctgatgcggccgcggccagatccgttaacggccactttgtacaagaaagctgggtgcccggggttaaccttcagcttagaaatgatgtgttttctacacttttctcttcttttttttcttttcatctcacatgaatcaaaaagagaaagcttaattacattaaaggttgatgtgatatttactttctaaatatttgctagaagaaattataatgataacattaaattaagttatagtcatttctatttcggttgtctcccactttctgctatgcttttacaacaacagttcaagatttggaatcgttttctttctccaccaatcgtagtaatacttctttttgtgtttgttgaaattttgcaagattctctcttcctctggttaatacacataacttacttggtaagcttggctgcattttcttttcaagcttttaatcaaagactcactagaaattgcaaaggcaaacataaaattatgtgatcaaactcctactgtgagtttttggttacaaacaaaagttaaaaacaaaagcttgatatttaaaagataaactcaacacatatgcatttgactggcgcacagaagacaattcaagacttgggaaaacagtgagccatcaaaatcgtcagataattcagggaatatattgaatgtggagatgtggtaatcacactattgcacacaaagagtggcaaacaagcggcgcccttggtttggtatagtaagagacaattgttttggactgtttgtgttgccatattcacaaaaatactattgagctatgtatgttaaacattatggtcaatgagtagtagtgaacattcaagtttttttttttttccacttcaagtttttcatcttattattatttttcgttgtgatgcagtagtacggcccatcttcaccagtagtatatcaaagccgaaacagatgacaaattgtttaacatgcacttggattattattgagagttgaaatacaaaggcccgttacaagcccaaacgaaggtacataaaagaaaagcagaaaatgaaaacgaaatcgatagggataagtttttccaactgacggaaacacaaactacaccaggtgaaatagatcacctcccaagtgcatgagacacgaaccaaccacttatcatcagatcacaaaagagctcaaagatctagcgatcgcctaattcagtttgtggccaagctttgatggcaagtcgcaatatctagcgacggccacctcgtgctgctccacataagtctccttgtcggcctcttttatgcgctcgagtctatggtccacgtaatacacgccgggcattttcaagtttttggcaggctttttggagcggtaggtggtcttgaagttacagatgagatggcctccgccgacaagcttcaaggccatgtcggatctaccttcaagaccaccgtcggctgggtaaagcatttcagtattggcttcccagccgagagtcttcttctgcatcacgggaccgtttgatgggaagttcacgccgcggatcttgacgttgtagatcaagcagccgtcttgaagactagtgtcttgggtggcggtcaagactcctccgtcttcgtaggtggtcactctctcccaggtgaatccctctgggaatgactgtttgaagaagtctgggatgccctgggtgtggttgatgaaggttctactcccgtacatgaaggaggtggctagtatgtcgaaggcgaatgggagtggacctccttcgaccaccttgattctcatagtctgggttccctcatagggcttgccctcaccctcagaggtacacttgaagtggtgattattcacggtgccctccatgtataacttcatgtgcatgttctctttaatgagctcctcccccttggacaccatggctgtagagtcaacaatcacaagataaatcagaatcaaaatccatcacgtaatttcaagaagcaatttcgtgaaaaaaaatcctaatctatggccacagaatcaacaaataaggtagttgctaaaggacctgagcaatatctcttgaaataccatacagaatcaacgaataaggcttttatcaacggatctgaacaatttcttgaaaaacgactgaagtatcaacaaataaggctgttgtttaacggatctgaagtagttcatgaaaaaaaccttaatctacgactacagaatcaacaattaaggcttgttgtaaacggatctgaaaatctttatgaaaaaaactctaattagacctaatttacggttataaaatcatcaattaaggacgttcttgcattaataaaagctgaatcttctgattatgaaaatttataatcgatgaaacgatagaaaacacaatcaaatcaacatcatgctgatgtagaacaaacaataaagaagaagaaaaaaaaacggaagaaatctacgaaccttgaaaggagaggtagggaactgcgcaaagagaatgaactaatttgattgcaattgaagtgcgattagggtcgaggggtgtgggggcattttatagcatatgcggtggaaccgttctccaatcatattgtgacgcgtgcccatgtatggtgtgacttggtgtttatgacacagatgatatttcggggagtccttcgtagttgacggtttcgtaatcttgacggagtcagagatgtaccttcaccgcttcacgcttggctttatccgttaccacggcgttattaaattgggcccgcacccgttgcaagttaggaccacagtgtccattacctgaacggtcggctgctaccagtattttacattattaaaatctatggaaaagctgtcacgctagatttttttttttttttttatggataagaaaagactaataggaaagctttcttactccactaaagtctttaataattattttttcaattttcaaataaaatcataatcatcccactaaattctttctcatttgtttttcactttgtaagatattcttccgtagatttttataagtaattctttaagatacatagcataataaattgtatacttttagttacagtctatataaaattagtcatttaaaaaatatagccttaatgatttttttaaaatgaagttatttttttctaatttttctttcttatttattatcgaatgattttttctactaatcgtttagggaagagttttatttttctaatgacgagatgtgttaaatgatgcaacttgaaggcgacatattttttaccaataaaataaaactaaaagatagcttgttgacaaaaacaataattgatgttaaagaaaacgtaagggcaatgggtatcatctaattgttggacaagttgtcttctaaggctaggtaagcttttgttttttattagctgaaatatttatttaattgttctataaataaattttttaaaatgatttttaatgtttttaaatattatttaaaataatttttttaaaattttaacattttagtttttaattattttttatcttacttaaattaattataatttattattttctaccattttatactttccaattaattttatcgaagcattaataccatctggtattttgtcactgcttcgtatgattgtttattaaattttagcttctttcacattggagatgctgggcggtgtgagttacagcatggtgtgaagttaaggtggtttgattatggaacccgaaggtgttggtgcaaggtggataaaattgcttgccaggagatacataaaatgatttacaaaatgaaataaagaataaataaatagtcaagttcaaatttaaatcaaggattagaattatttttccgtacatgatgtaaccgcaatcaccccctgctgaatccagatggccattctggccgaatttaagtgactagggtcaccctgctgaatccagatggccattctggccgaatttaagtgactagggtcacgtgaccctagtcacttaccggattctggccgtaccgagctcgaattcggcccaacttttctatacaaagttgaggtacgagatccgcccatccggccggccagatcctgcaggagatccaagcttggcgcgccttaattaataagtgactagggtcacgtgaccctagtcacttatgattccgatgacttcgtaggttcctagctcaagccgctcgtgtccaagcgtcacttacgattagctaatgattacggcatctaggaccgactagttcttatgtgcttctagtctccaaatgtggttgatagttattttgctctaagatcaacagtaatgaagtataaatcatcgttgtggtgtgctactcggttaattgagcattaacacacacaaacatgacgaggatggtataatctccaaaaatgtgtactttgttaggtgggaccctatagccttgattaatgtgctatgttaggcatgcctggaaacgtgtgacgcatatgttttgtgaacctgttgatattatatgtgcttttatattaccatattttattaaaatactaatatttattactagtaagatataacattctatctagcttaaaaactaaccataaatattccataataactagatttaccaaactaatatactaaatatacataataaatacaaaattaacaagacaataatcaatatttatgagcttaatatatttagacattatggttggtcgacgataatcatgctaacttttcgtaattgcttgattgaaatatgcttagaataatgcctctttgttctacatggcaaatagggaccattatggtgtaacaccctgggaaccacaaacaccccgaaatgctactaaactacacaactaaccttcatatataaaatttcgacagcatctcctttgaaaatttgcatagacgtggaagcaacagagtataaacagatctagctagctaagtttaaacggccggccatttacaattgaatatatcctgccattttacacctcgatatatcctgccacaaattccatgtacacagtacattaaaaacgtccgcaatgtgttattaagttgtctaagcgtcaatttgtttacaccacaatatatcctgcca

SEQ ID NO: 8 - DNA, 7710 bp, Artificial
  Synthetic construct comprising the T-DNA (RB to LB):  RB + GM-UBQ PRO-V1::GM-UBQ 5' UTR::GM-UBQ INTRON1::TAGRFP::UBQ3 TERM + AT-UBIQ10 PRO::AT-UBIQ10 5' UTR::AT-UBIQ10 INTRON1::CTP::SPCN::UBQ14 TERM + LB
aattacaacggtatatatcctgtcagccaacaccaaaacatcaaaaaaatcgggatcaggatcaggatctgcggccgcatcctgcaggatctggccggccggatgggcggatctcgtacctcaactttgtatagaaaagttgggccgaattcgagctcggtacggccagaatccggtaagtgactagggtcacgtgaccctagtcacttaaattcggccagaatggccatctggattcagcagggtgaccctagtcacttaaattcggccagaatggccatctggattcagcagggggtgattgcggttacatcatgtacggaaaaataattctaatccttgatttaaatttgaacttgactatttatttattctttatttcattttgtaaatcattttatgtatctcctggcaagcaattttatccaccttgcaccaacaccttcgggttccataatcaaaccaccttaacttcacaccatgctgtaactcacaccgcccagcatctccaatgtgaaagaagctaaaatttaataaacaatcatacgaagcagtgacaaaataccagatggtattaatgcttcgataaaattaattggaaagtataaaatggtagaaaataataaattataattaatttaagtaagataaaaaataattaaaaactaaaatgttaaaattttaaaaaaattattttaaataatatttaaaaacattaaaaatcattttaaaaaatttatttatagaacaattaaataaatatttcagctaataaaaaacaaaagcttacctagccttagaagacaacttgtccaacaattagatgatacccattgcccttacgttttctttaacatcaattattgtttttgtcaacaagctatcttttagttttattttattggtaaaaaatatgtcgccttcaagttgcatcatttaacacatctcgtcattagaaaaataaaactcttccctaaacgattagtagaaaaaatcattcgataataaataagaaagaaaaattagaaaaaaataacttcattttaaaaaaatcattaaggctatattttttaaatgactaattttatatagactgtaactaaaagtatacaatttattatgctatgtatcttaaagaattacttataaaaatctacggaagaatatcttacaaagtgaaaaacaaatgagaaagaatttagtgggatgattatgattttatttgaaaattgaaaaaataattattaaagactttagtggagtaagaaagctttcctattagtcttttcttatccataaaaaaaaaaaaaaaaatctagcgtgacagcttttccatagattttaataatgtaaaatactggtagcagccgaccgttcaggtaatggacactgtggtcctaacttgcaacgggtgcgggcccaatttaataacgccgtggtaacggataaagccaagcgtgaagcggtgaaggtacatctctgactccgtcaagattacgaaaccgtcaactacgaaggactccccgaaatatcatctgtgtcataaacaccaagtcacaccatacatgggcacgcgtcacaatatgattggagaacggttccaccgcatatgctataaaatgcccccacacccctcgaccctaatcgcacttcaattgcaatcaaattagttcattctctttgcgcagttccctacctctcctttcaaggttcgtagatttcttccgtttttttttcttcttctttattgtttgttctacatcagcatgatgttgatttgattgtgttttctatcgtttcatcgattataaattttcataatcagaagattcagcttttattaatgcaagaacgtccttaattgatgattttataaccgtaaattaggtctaattagagtttttttcataaagattttcagatccgtttacaacaagccttaattgttgattctgtagtcgtagattaaggtttttttcatgaactacttcagatccgttaaacaacagccttatttgttgatacttcagtcgtttttcaagaaattgttcagatccgttgataaaagccttattcgttgattctgtatggtatttcaagagatattgctcaggtcctttagcaactaccttatttgttgattctgtggccatagattaggattttttttcacgaaattgcttcttgaaattacgtgatggattttgattctgatttatcttgtgattgttgactctacagccatggtgtccaagggggaggagctcattaaagagaacatgcacatgaagttatacatggagggcaccgtgaataatcaccacttcaagtgtacctctgagggtgagggcaagccctatgagggaacccagactatgagaatcaaggtggtcgaaggaggtccactcccattcgccttcgacatactagccacctccttcatgtacgggagtagaaccttcatcaaccacacccagggcatcccagacttcttcaaacagtcattcccagagggattcacctgggagagagtgaccacctacgaagacggaggagtcttgaccgccacccaagacactagtcttcaagacggctgcttgatctacaacgtcaagatccgcggcgtgaacttcccatcaaacggtcccgtgatgcagaagaagactctcggctgggaagccaatactgaaatgctttacccagccgacggtggtcttgaaggtagatccgacatggccttgaagcttgtcggcggaggccatctcatctgtaacttcaagaccacctaccgctccaaaaagcctgccaaaaacttgaaaatgcccggcgtgtattacgtggaccatagactcgagcgcataaaagaggccgacaaggagacttatgtggagcagcacgaggtggccgtcgctagatattgcgacttgccatcaaagcttggccacaaactgaattaggcgatcgctagatctttgagctcttttgtgatctgatgataagtggttggttcgtgtctcatgcacttgggaggtgatctatttcacctggtgtagtttgtgtttccgtcagttggaaaaacttatccctatcgatttcgttttcattttctgcttttcttttatgtaccttcgtttgggcttgtaacgggcctttgtatttcaactctcaataataatccaagtgcatgttaaacaatttgtcatctgtttcggctttgatatactactggtgaagatgggccgtactactgcatcacaacgaaaaataataataagatgaaaaacttgaagtggaaaaaaaaaaaaacttgaatgttcactactactcattgaccataatgtttaacatacatagctcaatagtatttttgtgaatatggcaacacaaacagtccaaaacaattgtctcttactataccaaaccaagggcgccgcttgtttgccactctttgtgtgcaatagtgtgattaccacatctccacattcaatatattccctgaattatctgacgattttgatggctcactgttttcccaagtcttgaattgtcttctgtgcgccagtcaaatgcatatgtgttgagtttatcttttaaatatcaagcttttgtttttaacttttgtttgtaaccaaaaactcacagtaggagtttgatcacataattttatgtttgcctttgcaatttctagtgagtctttgattaaaagcttgaaaagaaaatgcagccaagcttaccaagtaagttatgtgtattaaccagaggaagagagaatcttgcaaaatttcaacaaacacaaaaagaagtattactacgattggtggagaaagaaaacgattccaaatcttgaactgttgttgtaaaagcatagcagaaagtgggagacaaccgaaatagaaatgactataacttaatttaatgttatcattataatttcttctagcaaatatttagaaagtaaatatcacatcaacctttaatgtaattaagctttctctttttgattcatgtgagatgaaaagaaaaaaaagaagagaaaagtgtagaaaacacatcatttctaagctgaaggttaaccccgggcacccagctttcttgtacaaagtggccgttaacggatctggccgcggccgcatcaggatattcttgtttaagatgttgaactctatggaggtttgtatgaactgatgatctaggaccggataagttcccttcttcatagcgaacttattcaaagaatgttttgtgtatcattcttgttacattgttattaatgaaaaaatattattggtcattggactgaacacgagtgttaaatatggaccaggccccaaataagatccattgatatatgaattaaataacaagaataaatcgagtcaccaaaccacttgccttttttaacgagacttgttcaccaacttgatacaaaagtcattatcctatgcaaatcaataatcatacaaaaatatccaataacactaaaaaattaaaagaaatggataatttcacaatatgttatacgataaagaagttacttttccaagaaattcactgattttataagcccacttgcattagataaatggcaaaaaaaaacaaaaaggaaaagaaataaagcacgaagaattctagaaaatacgaaatacgcttcaatgcagtgggacccacggttcaattattgccaattttcagctccaccgtatatttaaaaaataaaacgataatgctaaaaaaatataaatcgtaacgatcgttaaatctcaacggctggatcttatgacgaccgttagaaattgtggttgtcgacgagtcagtaataaacggcgtcaaagtggttgcagccggcacacacgagtcgtgtttatcaactcaaagcacaaatacttttcctcaacctaaaaataaggcaattagccaaaaacaactttgcgtgtaaacaacgctcaatacacgtgtcattttattattagctattgcttcaccgccttagctttctcgtgacctagtcgtcctcgtcttttcttcttcttcttctataaaacaatacccaaagagctcttcttcttcacaattcagatttcaatttctcaaaatcttaaaaactttctctcaattctctctaccgtgatcaaggtaaatttctgtgttccttattctctcaaaatcttcgattttgttttcgttcgatcccaatttcgtatatgttctttggtttagattctgttaatcttagatcgaagacgattttctgggtttgatcgttagatatcatcttaattctcgattagggtttcatagatatcatccgatttgttcaaataatttgagttttgtcgaataattactcttcgatttgtgatttctatctagatctggtgttagtttctagtttgtgcgatcgaatttgtcgattaatctgagtttttctgattaacagccatggctgcaactactcttacatctgctttacctggtgctttcagttcatcccagagaccaagtgctcctttcaacttacaaagatcacctagagtgcttagaaggttcaacagaaagacaggacgtcaacctcgtggacttgttcgtgctgcaaaggctcaagcggcgcaaaacctgccagagaaattcgatgaaacaagactctgggaggccctcaggggatttggggttagtccaagtagggttacttacgctcccgtcggattcggagattaccactggaccgtcacagatgaagacgggagaccttggttcgcaactgtcagtgacctcgaacacaaagagcattgcgggcagggagcacaagcagcccttaaaggactcagacaagctatggacactgccctcgcacttagagatagggacggactcagattcgtggttgctccagtggcagcaacagatgggggtggccctgtccttccccttgacgctaggtatgcactcacagtcttccctcacgtcccaggaagaacaggagagttcggacaaagactcacagaggcagagagggacagactgcttgctcttctggcagaactccacggaagaacacctcctgaaacaaccccaccagccgatatggaaccaccaggacttcctggtgttagagcagcactcgccgaaagtgaaggaccttggagtggaggaccatttgcagaacccgctagacttcttctcagagaacacgaggccacactgcacgcaagactcgctgaattcgaagccctcgtcgcaagagttaagggtcgtggagcacctcttgtcgttacccacggagaaccacacccaggcaacttgatcctcggagaggaaggctatctcctcgtggactgggatacagttggactggctccagctgaaagggatttgagtctcatctcagacgacccagctgacctcgcaagatacgcagagcttacaggaagaactccagacccagacgcactcgcactctatagactgcgttggagtctccttgatgtggctgagttcgtcgagtggttcagggctgaacaccaaagaacccaagacaccgagagtgcatggaaggggttcactgacacacttgggcaattggctgctggtggatcagctgcatagcctaggaaacttatctctgttatgaatcagaagaagttcatgtctcgtttcatttaaaactttggtggtttgtgttttggggccttgtaaagcccctgatgaataattgttcaactatgtttccgttcctgtgttatacctttctttctaatgagtaatgacatcaaacttcttctgtattgaaattatgtccttgtgagtctctttatcatcgtttcgtctttacattatatgtgctacttttgtctaatgagcctgaaaagtggctccaatggtacgcactggaagatttgttggcttctggtagatatagcgacagtgttgagcttgtaatatcatgtctcttattgctaaattagttcctttcttaacagaaaccttcaaagtttttgtttttgttttcatttacctaatgtacacatacgctggccatgactaacaacatgtccaggcttagagcatatttttttctagcttaaattgttaacttgtcattcagtaaaatccgagaattgtgaagctctaattgaagctaattcgttttataaagtcagttaaaaagtatactaaattatccaacttttcttcaaaatctcaaaattctatgacaaaacgatagtctttgtttatgtcagtaccacaaagaggtggaaaaaaacaccaaaaaaacaataagcaaactatacactgagaagaaaaataaaagagagctcaatagatgttttatactaacggtagattagatcaaagatccaagctttactctacatagagcagaacccagaatcccttcatatctcttttattctagcaccgataatctactgaaaagaagacacttagagctctgtctctttgtcaaagaagtcccagccgtcatccagaagctccttacgttcattaacagaggtaccggcggccgcgggcaactttattatacaaagttgatagattgtatgaattcatttacaattgaatatatcctgccattttacacctcgatatatcctgccacaaattccatgtacacagtacattaaaaacgtccgcaatgtgttattaagttgtctaagcgtcaatttgtttacaccacaatatatcctgcca

SEQ ID NO: 9 - DNA, 999 bp, Streptomyces spectabilis
atgcagaatcttcctgaaaagttcgatgaaacacgcctatgggaagctttgaggggatttggtgtgtccccgtcgcgtgtcacctacgcccccgtcggattcggggactaccactggacggtgaccgacgaggacggccggccgtggttcgccaccgtctccgacctggagcacaaggagcactgcgggcagggggcacaggccgcgctgaaggggctccgacaggccatggacacggcgctggccctgcgcgaccgtgacggactgcggttcgtcgtggcaccggtggccgccaccgacggcggcggtccagtactgcccctggacgcccggtacgcgctcacggtgttcccccatgtcccgggccgcacaggggagttcgggcagcgcctgacggaggccgagcgggaccggctgctcgccctgctcgcggagctgcacggccggacgcccccggagaccacaccgcccgccgacatggagcccccgggccttcccggcgtgcgcgcggccctggccgagtcggaagggccctggtcgggcggcccgttcgccgagcccgcgcggctgctgctgcgcgagcacgaggcgacgctccacgcgcgcctcgccgagttcgaggccctcgtcgcgcgcgtgaagggccggggcgcgccgctcgtcgtcacgcacggcgagccgcatccgggcaacctcatcctgggtgaggagggctatctcctggtggactgggacacggtgggcctcgccccggccgagcgcgacctctccctgatctcggacgacccggcggacctcgcccgctacgccgagctgaccggccgcaccccggacccggacgccctcgcgctctaccggctgcgctggagcctgctggacgtggccgagttcgtggagtggttccgcgccgagcaccagcgcacgcaggacaccgagtccgcgtggaagggcttcacggacacgctggggcaactggcggcgggcggatccgcagcctag

SEQ ID NO: 10 - protein, 332 aa, Streptomyces spectabilis
MQNLPEKFDETRLWEALRGFGVSPSRVTYAPVGFGDYHWTVTDEDGRPWFATVSDLEHKEHCGQGAQAALKGLRQAMDTALALRDRDGLRFVVAPVAATDGGGPVLPLDARYALTVFPHVPGRTGEFGQRLTEAERDRLLALLAELHGRTPPETTPPADMEPPGLPGVRAALAESEGPWSGGPFAEPARLLLREHEATLHARLAEFEALVARVKGRGAPLVVTHGEPHPGNLILGEEGYLLVDWDTVGLAPAERDLSLISDDPADLARYAELTGRTPDPDALALYRLRWSLLDVAEFVEWFRAEHQRTQDTESAWKGFTDTLGQLAAGGSAA

SEQ ID NO: 11 - DNA, 999 bp, Artificial
  Maize-codon-optimized SPCN coding sequence
atgcagaacctccccgagaagttcgatgaaacacgcctctgggaggcattgcgcggattcggagtctcccctagcagagtgacctacgccccagtcggattcggcgattaccactggaccgtcaccgacgaggacggtagaccctggttcgcaaccgtcagcgacctcgagcacaaggagcactgcggacaaggtgctcaagcagcactgaagggcctcagacaggcgatggacacagcactcgccttgagggacagagacggacttcgcttcgtcgtcgcacctgtggcagcaacagacggaggtggaccagtgcttccactggacgcaagatacgccctgacagtgttcccccacgtcccaggaagaacaggcgagttcggacaacgcctgaccgaagcagaacgcgatcgcctcctcgcattgcttgccgaactccacggacggactccaccagaaacaacccccccagcagacatggaacccccaggacttccaggagtcagagcagctctcgcggaaagcgaaggaccttggtccggaggaccctttgccgaaccagcacggcttctcttgagagaacacgaggcgaccctccacgcgagacttgctgaattcgaggccctggtcgcaagggtcaagggcagaggagcaccactggtcgttacacacggcgaaccgcatccaggcaacctcatcctgggagaagagggctacctgctcgtcgactgggacacagtgggattggctccagctgaacgcgacctcagcttgatcagcgacgatccagcggacctcgcgagatatgccgaactcacaggacggacgccagaccccgatgctcttgcactctacagactgcgctggagcctcctcgatgtggcagagttcgtcgagtggttcagagccgagcaccagagaacccaggacaccgagagcgcatggaagggcttcacagacacactgggccagttggcagctgggggttctgctgcgtag

SEQ ID NO: 12 - protein, 332 aa, Artificial; identical to SEQ ID NO: 10
  Maize-codon-optimized Streptomyces spectabilis SPCN protein sequence

SEQ ID NO: 13 - DNA, 999 bp, Artificial
  Soybean-codon-optimized SPCN coding sequence
atgcaaaacctgccagagaaattcgatgaaacaagactctgggaggccctcaggggatttggggttagtccaagtagggttacttacgctcccgtcggattcggagattaccactggaccgtcacagatgaagacgggagaccttggttcgcaactgtcagtgacctcgaacacaaagagcattgcgggcagggagcacaagcagcccttaaaggactcagacaagctatggacactgccctcgcacttagagatagggacggactcagattcgtggttgctccagtggcagcaacagatgggggtggccctgtccttccccttgacgctaggtatgcactcacagtcttccctcacgtcccaggaagaacaggagagttcggacaaagactcacagaggcagagagggacagactgcttgctcttctggcagaactccacggaagaacacctcctgaaacaaccccaccagccgatatggaaccaccaggacttcctggtgttagagcagcactcgccgaaagtgaaggaccttggagtggaggaccatttgcagaacccgctagacttcttctcagagaacacgaggccacactgcacgcaagactcgctgaattcgaagccctcgtcgcaagagttaagggtcgtggagcacctcttgtcgttacccacggagaaccacacccaggcaacttgatcctcggagaggaaggctatctcctcgtggactgggatacagttggactggctccagctgaaagggatttgagtctcatctcagacgacccagctgacctcgcaagatacgcagagcttacaggaagaactccagacccagacgcactcgcactctatagactgcgttggagtctccttgatgtggctgagttcgtcgagtggttcagggctgaacaccaaagaacccaagacaccgagagtgcatggaaggggttcactgacacacttgggcaattggctgctggtggatcagctgcatag

SEQ ID NO: 14 - protein, 332 aa, Artificial; identical to SEQ ID NO: 10
  Soybean-codon-optimized SPCN protein sequenc

SEQ ID NO: 15 - DNA, 996 bp, Legionella pneumophila
atgttgaagcaaccaattcaggctcagcagctcatcgagctcttgaaggtccactacggaatcgacatccacaccgctcagttcattcagggaggagccgacactaacgctttcgcttaccaggccgactctgagtctaagtcttacttcataaagctaaaatacggctaccacgatgaaattaatctctccatcatcagactcctccacgactccggaataaaagagatcatcttccccatccacaccctcgaggctaagttgttccagcagctcaagcatttcaaaataattgcctaccccttcattcacgctcccaacggattcactcagaacctcactggaaagcagtggaagcagctcggaaaggtcctcagacagatccatgaaacatccgtccccatctccatccagcagcaattaagaaaggagatctactcccccaagtggagagagatcgtcaggtccttctacaatcaaatcgagttcgacaactccgacgacaagctcaccgccgctttcaagtctttcttcaaccaaaatagtgccgctatccacagactagtcgacacttccgagaagctctccaagaagattcagcccgacttggacaagtacgtcttgtgccactccgacatacatgctggaaacgtcttggtcggaaacgaggagtccatctacattattgactgggacgagcctatgttggctcctaaggagagagacctcatgttcatcggaggcggcgtcggcaacgtctggaataaacctcatgaaatccagtacttctacgagggatacggagaaataaatgtcgataaaacaatcctctcctactacagacacgagagaatcgtcgaggacatcgctgtctacggacaggacttgctctccagaaatcaaaacaaccagtccaggctcgagtccttcaagtacttcaaggagatgttcgaccccaacaacgtcgtcgagatcgctttcgctactgagcagtag

SEQ ID NO: 16 - protein, 331 aa, Legionella pneumophila
MLKQPIQAQQLIELLKVHYGIDIHTAQFIQGGADTNAFAYQADSESKSYFIKLKYGYHDEINLSIIRLLHDSGIKEIIFPIHTLEAKLFQQLKHFKIIAYPFIHAPNGFTQNLTGKQWKQLGKVLRQIHETSVPISIQQQLRKEIYSPKWREIVRSFYNQIEFDNSDDKLTAAFKSFFNQNSAAIHRLVDTSEKLSKKIQPDLDKYVLCHSDIHAGNVLVGNEESIYIIDWDEPMLAPKERDLMFIGGGVGNVWNKPHEIQYFYEGYGEINVDKTILSYYRHERIVEDIAVYGQDLLSRNQNNQSRLESFKYFKEMFDPNNVVEIAFATEQ

SEQ ID NO: 17 - DNA, 5080 bp, Artificial
  Synthetic construct comprising:  FRT1:PMI:: PINII TERM + UBI1ZM PRO::DS- RED2::PINII TERM + FRT87
gaagttcctattccgaagttcctattctctagaaagtataggaacttcagatcctagaggatcgatccccgatcatgcaaaaactcattaactcagtgcaaaactatgcctggggcagcaaaacggcgttgactgaactttatggtatggaaaatccgtccagccagccgatggccgagctgtggatgggcgcacatccgaaaagcagttcacgagtgcagaatgccgccggagatatcgtttcactgcgtgatgtgattgagagtgataaatcgactctgctcggagaggccgttgccaaacgctttggcgaactgcctttcctgttcaaagtattatgcgcagcacagccactctccattcaggttcatccaaacaaacacaattctgaaatcggttttgccaaagaaaatgccgcaggtatcccgatggatgccgccgagcgtaactataaagatcctaaccacaagccggagctggtttttgcgctgacgcctttccttgcgatgaacgcgtttcgtgaattttccgagattgtctccctactccagccggtcgcaggtgcacatccggcgattgctcactttttacaacagcctgatgccgaacgtttaagcgaactgttcgccagcctgttgaatatgcagggtgaagaaaaatcccgcgcgctggcgattttaaaatcggccctcgatagccagcagggtgaaccgtggcaaacgattcgtttaatttctgaattttacccggaagacagcggtctgttctccccgctattgctgaatgtggtgaaattgaaccctggcgaagcgatgttcctgttcgctgaaacaccgcacgcttacctgcaaggcgtggcgctggaagtgatggcaaactccgataacgtgctgcgtgcgggtctgacgcctaaatacattgatattccggaactggttgccaatgtgaaattcgaagccaaaccggctaaccagttgttgacccagccggtgaaacaaggtgcagaactggacttcccgattccagtggatgattttgccttctcgctgcatgaccttagtgataaagaaaccaccattagccagcagagtgccgccattttgttctgcgtcgaaggcgatgcaacgttgtggaaaggttctcagcagttacagcttaaaccgggtgaatcagcgtttattgccgccaacgaatcaccggtgactgtcaaaggccacggccgtttagcgcgtgtttacaacaagctgtaagagcttactgaaaaaattaacatctcttgctaagatccatgcatggatattcgaacgcgtaggtaccacatggttaacctagacttgtccatcttctggattggccaacttaattaatgtatgaaataaaaggatgcacacatagtgacatgctaatcactataatgtgggcatcaaagttgtgtgttatgtgtaattactagttatctgaataaaagagaaagagatcatccatatttcttatcctaaatgaatgtcacgtgtctttataattctttgatgaaccagatgcatttcattaaccaaatccatatacatataaatattaatcatatataattaatatcaattgggttagcaaaacaaatctagtctaggtgtgttttgcgaattgcggccagcttggtcacccggtccgggcctagaaggccgatctcccgggcacccagctttcttgtacaaagtggccgttaacggatcggccagaatggcccggaccgggttacccggaccgaagcttgcatgcctgcagtgcagcgtgacccggtcgtgcccctctctagagataatgagcattgcatgtctaagttataaaaaattaccacatattttttttgtcacacttgtttgaagtgcagtttatctatctttatacatatatttaaactttactctacgaataatataatctatagtactacaataatatcagtgttttagagaatcatataaatgaacagttagacatggtctaaaggacaattgagtattttgacaacaggactctacagttttatctttttagtgtgcatgtgttctcctttttttttgcaaatagcttcacctatataatacttcatccattttattagtacatccatttagggtttagggttaatggtttttatagactaatttttttagtacatctattttattctattttagcctctaaattaagaaaactaaaactctattttagtttttttatttaataatttagatataaaatagaataaaataaagtgactaaaaattaaacaaataccctttaagaaattaaaaaaactaaggaaacatttttcttgtttcgagtagataatgccagcctgttaaacgccgtcgacgagtctaacggacaccaaccagcgaaccagcagcgtcgcgtcgggccaagcgaagcagacggcacggcatctctgtcgctgcctctggacccctctcgagagttccgctccaccgttggacttgctccgctgtcggcatccagaaattgcgtggcggagcggcagacgtgagccggcacggcaggcggcctcctcctcctctcacggcaccggcagctacgggggattcctttcccaccgctccttcgctttcccttcctcgcccgccgtaataaatagacaccccctccacaccctctttccccaacctcgtgttgttcggagcgcacacacacacaaccagatctcccccaaatccacccgtcggcacctccgcttcaaggtacgccgctcgtcctcccccccccccctctctaccttctctagatcggcgttccggtccatgcatggttagggcccggtagttctacttctgttcatgtttgtgttagatccgtgtttgtgttagatccgtgctgctagcgttcgtacacggatgcgacctgtacgtcagacacgttctgattgctaacttgccagtgtttctctttggggaatcctgggatggctctagccgttccgcagacgggatcgatttcatgattttttttgtttcgttgcatagggtttggtttgcccttttcctttatttcaatatatgccgtgcacttgtttgtcgggtcatcttttcatgcttttttttgtcttggttgtgatgatgtggtctggttgggcggtcgttctagatcggagtagaattctgtttcaaactacctggtggatttattaattttggatctgtatgtgtgtgccatacatattcatagttacgaattgaagatgatggatggaaatatcgatctaggataggtatacatgttgatgcgggttttactgatgcatatacagagatgctttttgttcgcttggttgtgatgatgtggtgtggttgggcggtcgttcattcgttctagatcggagtagaatactgtttcaaactacctggtgtatttattaattttggaactgtatgtgtgtgtcatacatcttcatagttacgagtttaagatggatggaaatatcgatctaggataggtatacatgttgatgtgggttttactgatgcatatacatgatggcatatgcagcatctattcatatgctctaaccttgagtacctatctattataataaacaagtatgttttataattattttgatcttgatatacttggatgatggcatatgcagcagctatatgtggatttttttagccctgccttcatacgctatttatttgcttggtactgtttcttttgtcgatgctcaccctgttgtttggtgttacttctgcaggtcgactttaacttagcctaggatccaccggtcgccaccatggcctcctccgagaacgtcatcaccgagttcatgcgcttcaaggtgcgcatggagggcaccgtgaacggccacgagttcgagatcgagggcgagggcgagggccgcccctacgagggccacaacaccgtgaagctgaaggtgacgaagggcggccccctgcccttcgcctgggacatcctgtccccccagttccagtacggctccaaggtgtacgtgaagcaccccgccgacatccccgactacaagaagctgtccttccccgagggcttcaagtgggagcgcgtgatgaacttcgaggacggcggcgtggcgaccgtgacccaggactcctccctgcaggacggctgcttcatctacaaggtgaagttcatcggcgtgaacttcccctccgacggccccgtgatgcagaagaagaccatgggctgggaggcctccaccgagcgcctgtacccccgcgacggcgtgctgaagggcgagacccacaaggccctgaagctgaaggacggcggccactacctggtggagttcaagtccatctacatggccaagaagcccgtgcagctgcccggctactactacgtggacgccaagctggacatcacctcccacaacgaggactacaccatcgtggagcagtacgagcgcaccgagggccgccaccacctgttcctgtagcggcccatggatattcgaacgcgtaggtaccacatggttaacctagacttgtccatcttctggattggccaacttaattaatgtatgaaataaaaggatgcacacatagtgacatgctaatcactataatgtgggcatcaaagttgtgtgttatgtgtaattactagttatctgaataaaagagaaagagatcatccatatttcttatcctaaatgaatgtcacgtgtctttataattctttgatgaaccagatgcatttcattaaccaaatccatatacatataaatattaatcatatataattaatatcaattgggttagcaaaacaaatctagtctaggtgtgttttgcgaatgcggccgccaccgcggtggagctcgaattccggtccgaagctgggcaactttattatacaaagttgatagatcgagcgactaattaactagctgtcccacggcctaactagcacttaatcccctagcctaacctaagagcgctaatctaggctagtggtcacttagggctttaaggctagcgtatacgaagttcctattccgaagttcctattctccagaaagtataggaacttc

SEQ ID NO: 18 - DNA, 6270 bp, Artificial
  Synthetic construct comprising:  UBI1ZM PRO::FLPm::PINII TERM
tcgcgcgtttcggtgatgacggtgaaaacctctgacacatgcagctcccggagacggtcacagcttgtctgtaagcggatgccgggagcagacaagcccgtcagggcgcgtcagcgggtgttggcgggtgtcggggctggcttaactatgcggcatcagagcagattgtactgagagtgcaccatatgcggtgtgaaataccgcacagatgcgtaaggagaaaataccgcatcaggcgccattcgccattcaggctgcgcaactgttgggaagggcgatcggtgcgggcctcttcgctattacgccagctggcgaaagggggatgtgctgcaaggcgattaagttgggtaacgccagggttttcccagtcacgacgttgtaaaacgacggccagtgccaagcttgcatgcctgcagtgcagcgtgacccggtcgtgcccctctctagagataatgagcattgcatgtctaagttataaaaaattaccacatattttttttgtcacacttgtttgaagtgcagtttatctatctttatacatatatttaaactttactctacgaataatataatctatagtactacaataatatcagtgttttagagaatcatataaatgaacagttagacatggtctaaaggacaattgagtattttgacaacaggactctacagttttatctttttagtgtgcatgtgttctcctttttttttgcaaatagcttcacctatataatacttcatccattttattagtacatccatttagggtttagggttaatggtttttatagactaatttttttagtacatctattttattctattttagcctctaaattaagaaaactaaaactctattttagtttttttatttaataatttagatataaaatagaataaaataaagtgactaaaaattaaacaaataccctttaagaaattaaaaaaactaaggaaacatttttcttgtttcgagtagataatgccagcctgttaaacgccgtcgacgagtctaacggacaccaaccagcgaaccagcagcgtcgcgtcgggccaagcgaagcagacggcacggcatctctgtcgctgcctctggacccctctcgagagttccgctccaccgttggacttgctccgctgtcggcatccagaaattgcgtggcggagcggcagacgtgagccggcacggcaggcggcctcctcctcctctcacggcacggcagctacgggggattcctttcccaccgctccttcgctttcccttcctcgcccgccgtaataaatagacaccccctccacaccctctttccccaacctcgtgttgttcggagcgcacacacacacaaccagatctcccccaaatccacccgtcggcacctccgcttcaaggtacgccgctcgtcctccccccccccccctctctaccttctctagatcggcgttccggtccatggttagggcccggtagttctacttctgttcatgtttgtgttagatccgtgtttgtgttagatccgtgctgctagcgttcgtacacggatgcgacctgtacgtcagacacgttctgattgctaacttgccagtgtttctctttggggaatcctgggatggctctagccgttccgcagacgggatcgatttcatgattttttttgtttcgttgcatagggtttggtttgcccttttcctttatttcaatatatgccgtgcacttgtttgtcgggtcatcttttcatgcttttttttgtcttggttgtgatgatgtggtctggttgggcggtcgttctagatcggagtagaattctgtttcaaactacctggtggatttattaattttggatctgtatgtgtgtgccatacatattcatagttacgaattgaagatgatggatggaaatatcgatctaggataggtatacatgttgatgcgggttttactgatgcatatacagagatgctttttgttcgcttggttgtgatgatgtggtgtggttgggcggtcgttcattcgttctagatcggagtagaatactgtttcaaactacctggtgtatttattaattttggaactgtatgtgtgtgtcatacatcttcatagttacgagtttaagatggatggaaatatcgatctaggataggtatacatgttgatgtgggttttactgatgcatatacatgatggcatatgcagcatctattcatatgctctaaccttgagtacctatctattataataaacaagtatgttttataattattttgatcttgatatacttggatgatggcatatgcagcagctatatgtggatttttttagccctgccttcatacgctatttatttgcttggtactgtttcttttgtcgatgctcaccctgttgtttggtgttacttctgcaggtcgactctagaggatccaacaatgccccagttcgacatcctctgcaagaccccccccaaggtgctcgtgaggcagttcgtggagaggttcgagaggccctccggcgagaagatcgccctctgcgccgccgagctcacctacctctgctggatgatcacccacaacggcaccgccattaagagggccaccttcatgtcatacaacaccatcatctccaactccctctccttcgacatcgtgaacaagtccctccagttcaaatacaagacccagaaggccaccatcctcgaggcctccctcaagaagctcatccccgcctgggagttcaccatcatcccctactacggccagaagcaccagtccgacatcaccgacatcgtgtcatccctccagcttcagttcgagtcctccgaggaggctgacaagggcaactcccactccaagaagatgctgaaggccctcctctccgagggcgagtccatctgggagatcaccgagaagatcctcaactccttcgagtacacctccaggttcactaagaccaagaccctctaccagttcctcttcctcgccaccttcatcaactgcggcaggttctcagacatcaagaacgtggaccccaagtccttcaagctcgtgcagaacaagtacctcggcgtgatcatccagtgcctcgtgaccgagaccaagacctccgtgtccaggcacatctacttcttctccgctcgcggcaggatcgaccccctcgtgtacctcgacgagttcctcaggaactcagagcccgtgctcaagagggtgaacaggaccggcaactcctcctccaacaagcaggagtaccagctcctcaaggacaacctcgtgaggtcctacaacaaggccctcaagaagaacgccccctactccatcttcgccatcaagaacggccccaagtcccacatcggtaggcacctcatgacctccttcctctcaatgaagggcctcaccgagctcaccaacgtggtgggcaactggtccgacaagagggcctccgccgtggccaggaccacctacacccaccagatcaccgccatccccgaccactacttcgccctcgtgtcaaggtactacgcctacgaccccatctccaaggagatgatcgccctcaaggacgagactaaccccatcgaggagtggcagcacatcgagcagctcaagggctccgccgagggctccatcaggtaccccgcctggaacggcatcatctcccaggaggtgctcgactacctctcctcctacatcaacaggaggatctgagttaacctagacttgtccatcttctggattggccaacttaattaatgtatgaaataaaaggatgcacacatagtgacatgctaatcactataatgtgggcatcaaagttgtgtgttatgtgtaattactagttatctgaataaaagagaaagagatcatccatatttcttatcctaaatgaatgtcacgtgtctttataattctttgatgaaccagatgcatttcattaaccaaatccatatacatataaatattaatcatatataattaatatcaattgggttagcaaaacaaatctagtctaggtgtgttttgcgaattgcggccgcgatctggggaattcgtaatcatggtcatagctgtttcctgtgtgaaattgttatccgctcacaattccacacaacatacgagccggaagcataaagtgtaaagcctggggtgcctaatgagtgagctaactcacattaattgcgttgcgctcactgcccgctttccagtcgggaaacctgtcgtgccagctgcattaatgaatcggccaacgcgcggggagaggcggtttgcgtattgggcgctcttccgcttcctcgctcactgactcgctgcgctcggtcgttcggctgcggcgagcggtatcagctcactcaaaggcggtaatacggttatccacagaatcaggggataacgcaggaaagaacatgtgagcaaaaggccagcaaaaggccaggaaccgtaaaaaggccgcgttgctggcgtttttccataggctccgcccccctgacgagcatcacaaaaatcgacgctcaagtcagaggtggcgaaacccgacaggactataaagataccaggcgtttccccctggaagctccctcgtgcgctctcctgttccgaccctgccgcttaccggatacctgtccgcctttctcccttcgggaagcgtggcgctttctcatagctcacgctgtaggtatctcagttcggtgtaggtcgttcgctccaagctgggctgtgtgcacgaaccccccgttcagcccgaccgctgcgccttatccggtaactatcgtcttgagtccaacccggtaagacacgacttatcgccactggcagcagccactggtaacaggattagcagagcgaggtatgtaggcggtgctacagagttcttgaagtggtggcctaactacggctacactagaaggacagtatttggtatctgcgctctgctgaagccagttaccttcggaaaaagagttggtagctcttgatccggcaaacaaaccaccgctggtagcggtggtttttttgtttgcaagcagcagattacgcgcagaaaaaaaggatctcaagaagatcctttgatcttttctacggggtctgacgctcagtggaacgaaaactcacgttaagggattttggtcatgagattatcaaaaaggatcttcacctagatccttttaaattaaaaatgaagttttaaatcaatctaaagtatatatgagtaaacttggtctgacagttaccaatgcttaatcagtgaggcacctatctcagcgatctgtctatttcgttcatccatagttgcctgactccccgtcgtgtagataactacgatacgggagggcttaccatctggccccagtgctgcaatgataccgcgagacccacgctcaccggctccagatttatcagcaataaaccagccagccggaagggccgagcgcagaagtggtcctgcaactttatccgcctccatccagtctattaattgttgccgggaagctagagtaagtagttcgccagttaatagtttgcgcaacgttgttgccattgctacaggcatcgtggtgtcacgctcgtcgtttggtatggcttcattcagctccggttcccaacgatcaaggcgagttacatgatcccccatgttgtgcaaaaaagcggttagctccttcggtcctccgatcgttgtcagaagtaagttggccgcagtgttatcactcatggttatggcagcactgcataattctcttactgtcatgccatccgtaagatgcttttctgtgactggtgagtactcaaccaagtcattctgagaatagtgtatgcggcgaccgagttgctcttgcccggcgtcaatacgggataataccgcgccacatagcagaactttaaaagtgctcatcattggaaaacgttcttcggggcgaaaactctcaaggatcttaccgctgttgagatccagttcgatgtaacccactcgtgcacccaactgatcttcagcatcttttactttcaccagcgtttctgggtgagcaaaaacaggaaggcaaaatgccgcaaaaaagggaataagggcgacacggaaatgttgaatactcatactcttcctttttcaatattattgaagcatttatcagggttattgtctcatgagcggatacatatttgaatgtatttagaaaaataaacaaataggggttccgcgcacatttccccgaaaagtgccacctgacgtctaagaaaccattattatcatgacattaacctataaaaataggcgtatcacgaggccctttcgtc

SEQ ID NO: 19 - DNA, 7122 bp, Artificial
  Synthetic construct comprising:  ZM-PLTP PRO::ZM-ODP2::OS-T28 TERM + FMV & PCSV ENHANCERS
cccagtcttccgactgagcctttcgttttatttgatgcctggcagttccctactctcgcgttaacgctagcatggatgttttcccagtcacgacgttgtaaaacgacggccagtcttaagctcgggccccaaataatgattttattttgactgatagtgacctgttcgttgcaacaaattgatgagcaatgcttttttataatgccaactttgtacaaaaaagcaggctccggccagaatggcccggaccgggttacgttaccgaattcttaccctagctccctgcggctgttacgcggtcccccatcaatcttctgttcttgcggttgtagcctgtgtaacagtgctagagtatgtatgataaataggttttaagtctgcttacatgacattttttattgtggaagagacatataaaaattagagagagtggttctcatgcaacggcggacggcccggtgctaaaagagcttcaagacaaaataatgaaacaggaagagagtagatttatctaagagccaactttattatatgaatgtgtttattgttggctttagatgatatggtaaggagttagagctaataatagataggctctattattattattattaattaaactcgctctaaggaggaaagtgggaggaagggacgaggacgaagactactggaagcatcgtgcatggatgatggatgtggtgtctcttaatgtaggtggccggaggatgtacgtgttaattgcgcgataagcactcagatccaaccgcaaactacctccacactgacacactgatagagagaaagagagacctccgacgactgccgccgcagatgagccacgtacgtatacgacgtctgccggccggctcaggctgccgccatcaccctgctcgaaagtcgcgttaggcggcgccagctacataggagtatctagtctagccagttagtatactactactgcgctgatgatgaattaactctgcatagatactgtacttgcctccctccaacacccaaccacctcctgctcggctcttaataacttggacacggatcgatgccatccaaggaagaacacgacgacgacgacggaacatccaccatgcaagcttgcatccatacgccgatacgcgtgcatccatccatccaccattatttccattttccaccgatcacacgtacacaggcctatttaaggagcgacatcccactgcaactctcctcaccactcatcaccagctagctctagcaaagcacttgccatctaccgaccgccgcattccaaacagcccgacgagctagcagagcggcaggcacctccctcctcaaggaacccatggccactgtgaacaactggctcgctttctccctctccccgcaggagctgccgccctcccagacgacggactccacactcatctcggccgccaccgccgaccatgtctccggcgatgtctgcttcaacatcccccaagattggagcatgaggggatcagagctttcggcgctcgtcgcggagccgaagctggaggacttcctcggcggcatctccttctccgagcagcatcacaaggccaactgcaacatgatacccagcactagcagcacagtttgctacgcgagctcaggtgctagcaccggctaccatcaccagctgtaccaccagcccaccagctcagcgctccacttcgcggactccgtaatggtggcttcctcggccggtgtccacgacggcggtgccatgctcagcgcggccgccgctaacggtgtcgctggcgctgccagtgccaacggcggcggcatcgggctgtccatgattaagaactggctgcggagccaaccggcgcccatgcagccgagggtggcggcggctgagggcgcgcaggggctctctttgtccatgaacatggcggggacgacccaaggcgctgctggcatgccacttctcgctggagagcgcgcacgggcgcccgagagtgtatcgacgtcagcacagggtggagccgtcgtcgtcacggcgccgaaggaggatagcggtggcagcggtgttgccggcgctctagtagccgtgagcacggacacgggtggcagcggcggcgcgtcggctgacaacacggcaaggaagacggtggacacgttcgggcagcgcacgtcgatttaccgtggcgtgacaaggcatagatggactgggagatatgaggcacatctttgggataacagttgcagaagggaagggcaaactcgtaagggtcgtcaagtctatttaggtggctatgataaagaggagaaagctgctagggcttatgatcttgctgctctgaagtactggggtgccacaacaacaacaaattttccagtgagtaactacgaaaaggagctcgaggacatgaagcacatgacaaggcaggagtttgtagcgtctctgagaaggaagagcagtggtttctccagaggtgcatccatttacaggggagtgactaggcatcaccaacatggaagatggcaagcacggattggacgagttgcagggaacaaggatctttacttgggcaccttcagcacccaggaggaggcagcggaggcgtacgacatcgcggcgatcaagttccgcggcctcaacgccgtcaccaacttcgacatgagccgctacgacgtgaagagcatcctggacagcagcgccctccccatcggcagcgccgccaagcgcctcaaggaggccgaggccgcagcgtccgcgcagcaccaccacgccggcgtggtgagctacgacgtcggccgcatcgcctcgcagctcggcgacggcggagccctggcggcggcgtacggcgcgcactaccacggcgccgcctggccgaccatcgcgttccagccgggcgccgccagcacaggcctgtaccacccgtacgcgcagcagccaatgcgcggcggcgggtggtgcaagcaggagcaggaccacgcggtgatcgcggccgcgcacagcctgcaggacctccaccacctgaacctgggcgcggccggcgcgcacgactttttctcggcagggcagcaggccgccgccgctgcgatgcacggcctgggtagcatcgacagtgcgtcgctcgagcacagcaccggctccaactccgtcgtctacaacggcggggtcggcgacagcaacggcgccagcgccgtcggcggcagtggcggtggctacatgatgccgatgagcgctgccggagcaaccactacatcggcaatggtgagccacgagcaggtgcatgcacgggcctacgacgaagccaagcaggctgctcagatggggtacgagagctacctggtgaacgcggagaacaatggtggcggaaggatgtctgcatgggggactgtcgtgtctgcagccgcggcggcagcagcaagcagcaacgacaacatggccgccgacgtcgggcatggcggcgcgcagctcttcagtgtctggaacgacacttaagcgtacctagtggtacctgacatcttatagtctgcaacctctcgtgtctgaattcctatctttatcaagtgttattgcttccacgactataggacagctttcgtcgaaagcttttgctcatgtgatctcgaaggattcatctagtctgatttttcgtgacttgtatcggttttattggattcatccaacatatatcaataaaaaatgagttgtgtttcctttcttcctagttcagttaaaattatttccctcctgcgcttgtgctgtaattgtctgtgtacctgttgtttgtgactgtgttagttcccttggatatgatttcgtatttgatatgtacatggagatagcttagcttcattattggagtatgaagttagtatgacatagtcactctcctggaaaattgacactgcaaaccatatttttattctgaaccacaaatcctagtcagtccgctggcatatgccgtccgtttgctgaatccagaacgtgggtttggagatgtacggctgagatgcctctatgcgaaggggatttcgtggtgaaacgagatgggagtagagcaacgcccgtggaagatgcttcaaacttccacacttttgagcaacgatcggcagtagtaaggtagacgatttcaagatcaaagcatatgaagataaacaacatcaacaacaaaatttgttggggttctatagagagaaacagagctacatacatacactgttttgtatctaccatctgagatgatgaaaagatgaaaaactaaagaatgccccggcgccaacgccaggacacgccgcgcgcgcgtcacccgagccatctcttgacccagccggcgctgtatatttacacacgttgcagcatcgatcaccacctgttcgatcgcgtcgccgtcacccgtacgcgtgcgatcgagcagctggcttgtggggaccagacaaaaaaggaatggtgcagaattgttaggcgcacctaccaaaagcatctttgcctttattgcaaagataaagcagattcctctagtacaagtggggaacaaaataacgtggaaaagagctgtcctgacagcccactcactaatgcgtatgacgaacgcagtgacgaccacaaaaattccggactagtggcgcgcctcaacgagatcatgagccaatcaaagaggagtgatgtagacctaaagcaataatggagccatgacgtaagggcttacgcccatacgaaataattaaaggctgatgtgacctgtcggtctctcagaacctttactttttatgtttggcgtgtatttttaaatttccacggcaatgacgatgtgaccaccggtgcctaggcccgggcacccagctttcttgtacaaagttggcattataagaaagcattgcttatcaatttgttgcaacgaacaggtcactatcagtcaaaataaaatcattatttgccatccagctgatatcccctatagtgagtcgtattacatggtcatagctgtttcctggcagctctggcccgtgtctcaaaatctctgatgttacattgcacaagataaaaatatatcatcatgaacaataaaactgtctgcttacataaacagtaatacaaggggtgttatgagccatattcaacgggaaacgtcgaggccgcgattaaattccaacatggatgctgatttatatgggtataaatgggctcgcgataatgtcgggcaatcaggtgcgacaatctatcgcttgtatgggaagcccgatgcgccagagttgtttctgaaacatggcaaaggtagcgttgccaatgatgttacagatgagatggtcagactaaactggctgacggaatttatgcctcttccgaccatcaagcattttatccgtactcctgatgatgcatggttactcaccactgcgatccccggaaaaacagcattccaggtattagaagaatatcctgattcaggtgaaaatattgttgatgcgctggcagtgttcctgcgccggttgcattcgattcctgtttgtaattgtccttttaacagcgatcgcgtatttcgtctcgctcaggcgcaatcacgaatgaataacggtttggttgatgcgagtgattttgatgacgagcgtaatggctggcctgttgaacaagtctggaaagaaatgcataaacttttgccattctcaccggattcagtcgtcactcatggtgatttctcacttgataaccttatttttgacgaggggaaattaataggttgtattgatgttggacgagtcggaatcgcagaccgataccaggatcttgccatcctatggaactgcctcggtgagttttctccttcattacagaaacggctttttcaaaaatatggtattgataatcctgatatgaataaattgcagtttcatttgatgctcgatgagtttttctaatcagaattggttaattggttgtaacactggcagagcattacgctgacttgacgggacggcgcaagctcatgaccaaaatcccttaacgtgagttacgcgtcgttccactgagcgtcagaccccgtagaaaagatcaaaggatcttcttgagatcctttttttctgcgcgtaatctgctgcttgcaaacaaaaaaaccaccgctaccagcggtggtttgtttgccggatcaagagctaccaactctttttccgaaggtaactggcttcagcagagcgcagataccaaatactgttcttctagtgtagccgtagttaggccaccacttcaagaactctgtagcaccgcctacatacctcgctctgctaatcctgttaccagtggctgctgccagtggcgataagtcgtgtcttaccgggttggactcaagacgatagttaccggataaggcgcagcggtcgggctgaacggggggttcgtgcacacagcccagcttggagcgaacgacctacaccgaactgagatacctacagcgtgagctatgagaaagcgccacgcttcccgaagggagaaaggcggacaggtatccggtaagcggcagggtcggaacaggagagcgcacgagggagcttccagggggaaacgcctggtatctttatagtcctgtcgggtttcgccacctctgacttgagcgtcgatttttgtgatgctcgtcaggggggcggagcctatggaaaaacgccagcaacgcggcctttttacggttcctggccttttgctggccttttgctcacatgttctttcctgcgttatcccctgattctgtggataaccgtattaccgcctttgagtgagctgataccgctcgccgcagccgaacgaccgagcgcagcgagtcagtgagcgaggaagcggaagagcgcccaatacgcaaaccgcctctccccgcgcgttggccgattcattaatgcagctggcacgacaggtttcccgactggaaagcgggcagtgagcgcaacgcaattaatacgcgtaccgctagccaggaagagtttgtagaaacgcaaaaaggccatccgtcaggatggccttctgcttagtttgatgcctggcagtttatggcgggcgtcctgcccgccaccctccgggccgttgcttcacaacgttcaaatccgctcccggcggatttgtcctactcaggagagcgttcaccgacaaacaacagataaaacgaaagg

SEQ ID NO: 20 - DNA, 6805 bp, Artificial
  Synthetic construct comprising:  ZM-PLTP PRO::ZM-WUS2::IN2-1 TERM
cccagtcttccgactgagcctttcgttttatttgatgcctggcagttccctactctcgcgttcatggagctccaaataatgattttattttgactgatagtgacctgttcgttgcaacaaattgataagcaatgcttttttataatgccaactttgtatagaaaagttgggccgagctcggtacggccagaatggcccggaccgggttaccgaattcttaccctagctccctgcggctgttacgcggtcccccatcaatcttctgttcttgcggttgtagcctgtgtaacagtgctagagtatgtatgataaataggttttaagtctgcttacatgacattttttattgtggaagagacatataaaaattagagagagtggttctcatgcaacggcggacggcccggtgctaaaagagcttcaagacaaaataatgaaacaggaagagagtagatttatctaagagccaactttattatatgaatgtgtttattgttggctttagatgatatggtaaggagttagagctaataatagataggctctattattattattattaattaaactcgctctaaggaggaaagtgggaggaagggacgaggacgaagactactggaagcatcgtgcatggatgatggatgtggtgtctcttaatgtaggtggccggaggatgtacgtgttaattgcgcgataagcactcagatccaaccgcaaactacctccacactgacacactgatagagagaaagagagacctccgacgactgccgccgcagatgagccacgtacgtatacgacgtctgccggccggctcaggctgccgccatcaccctgctcgaaagtcgcgttaggcggcgccagctacataggagtatctagtctagccagttagtatactactactgcgctgatgatgaattaactctgcatagatactgtacttgcctccctccaacacccaaccacctcctgctcggctcttaataacttggacacggatcgatgccatccaaggaagaacacgacgacgacgacggaacatccaccatgcaagcttgcatccatacgccgatacgcgtgcatccatccatccaccattatttccattttccaccgatcacacgtacacaggcctatttaaggagcgacatcccactgcaactctcctcaccactcatcaccagctagctctagcaaagcacttgccatctaccgaccgccgcattccaaacagcccgacgagctagcagagcggcaggcacctccctcctcaaggaacccatggcggccaatgcgggcggcggtggagcgggaggaggcagcggcagcggcagcgtggctgcgccggcggtgtgccgccccagcggctcgcggtggacgccgacgccggagcagatcaggatgctgaaggagctctactacggctgcggcatccggtcgcccagctcggagcagatccagcgcatcaccgccatgctgcggcagcacggcaagatcgagggcaagaacgtcttctactggttccagaaccacaaggcccgcgagcgccagaagcgccgcctcaccagcctcgacgtcaacgtgcccgccgccggcgcggccgacgccaccaccagccaactcggcgtcctctcgctgtcgtcgccgccgccttcaggcgcggcgcctccctcgcccaccctcggcttctacgccgccggcaatggcggcggatcggctgtgctgctggacacgagttccgactggggcagcagcggcgctgctatggccaccgagacatgcttcctgcaggactacatgggcgtgacggacacgggcagctcgtcgcagtggccacgcttctcgtcgtcggacacgataatggcggcggccgcggcgcgggcggcgacgacgcgggcgcccgagacgctccctctcttcccgacctgcggcgacgacggcggcagcggtagcagcagctacttgccgttctggggtgccgcgtccacaactgccggcgccacttcttccgttgcgatccaacagcaacaccagctgcaggagcagtacagcttttacagcaacagcaacagcacccagctggccggcaccggcaaccaagacgtatcggcaacagcagcagcagccgccgccctggagctgagcctcagctcatggtgctccccttaccctgctgcagggagtatgtgagagcaacgcgagctgccactgctcttcactgatgtctctggaatggaaggaggaggaagtgagaacagatcattcgacaaagcagcattagtccgttgatcggtggaagaccactcgtcagtgttgagttgaatgtttgatcaataaaatacggcaatgctgtaagggttgttttttatgccattgataatacactgtactgttcagttgttgaactctatttcttagccatgccaagtgcttttcttattttgaataacattacagcaaaaagttgaaagacaaaaaaaaaaacccccgaacagagtgctttgggtcccaagcttctttagactgtgttcggcgttccccctaaatttctccccctatatctcactcacttgtcacatcagcgttctctttccccctatatctccacgctctacagcagttccacctatatcaaacctctataccccaccacaacaatattatatactttcatcttcaactaactcatgtaccttccaatttttttctactaataattatttacgtgcacagaaacttagcaaggagagagagagcgggaatttaaatgctcggcgttaggcttttagtccgctaggtggctagaccgaggttaggacgctagttcactaggggcctagtggtgttttaagacgtcacggtcacctgaagaaactatgtgctgtagtatagccgctgcccgctggctagctagctagttgagtcatttagcggcgatgattgagtaataatgtgtcacgcatcaccatgcatgggtggcagtgtcagtgtgagcaatgacctgaatgaacaattgaaatgaaaagaaaaaagtattgttccaaattaaacgttttaaccttttaataggtttatacaataattgatatatgttttctgtatatgtctaatttgttatcatccatttagatatagacaaaaaaaatctaagaactaaaacaaatgctaatttgaaatgaagggagtatatattgggataatgtcgatgagatccctcgtaatatcaccgacatcacacgtgtccagttaatgtatcagtgatacgtgtattcacatttgttgcgcgtaggcgtacccaacaattttgatcgactatcagaaagtcaacggaagcgagtcgacctcgagggggggccccggccgaagcttcggccggggcccatcgataacgagtatcggtccccattgacacatctactcctaacgctaacaacattcttcacttctagtgtatggcatcgacaattggtactttaatcttgggtcttcacttttacaactaaacaacccaaatataaatattatttgagtgggtttggtgttcatcagaacattcccatctttggtaatgctacctagcataaaagtgagctatcacgttgggcagcccattccatgcaatttttaccttcctcaaaaaaaatctttgatatatttatggtataataatttaaacttcacattgatcataattttttcagcaaataagttccataatttggtgtttgcaatatcgaaattgttactcatagggtccagttgatttaatgacattagtgttgttaagttcacatgcttcaaagaattctacatgtctacaatgctgcatttgtctgtaaaatttgggttcttgtaaaaaatacatgtgttgaatatttaccaaaaaaatataatgcgatatgactttgtgtgagcatgtttggacacagttacaagtttacttctaaacttatattatgttttgcttcgtgcaagtacaagtgatttgaatatccaaggccaaagcatgtgtccatcactatatcaaatcaacataccatatatgtatatactcaacaaaaagcacaaataatcacatctatgttataaacacacccccacacaaccaaacattaacattcaataggttgtgctaggacatcattgggatgatgaagtaatattgtattatctatgtattgaccaagcatgagtttaaaattacgatttgatgttttcagttatttatatgatgaacatagttcagaaatatatcgagataaatctcaatcaatatattgattatttctaggaaacacatgccggtatgagggcaccattgtcgagtacatcttaagtgagttaacggatcctctagagtcgacctgcaggcatgcccgcggatatcgatgggccccggccgaagcttcaagtttgtacaaaaaagttgaacgagaaacgtaaaatgatataaatatcaatatattaaattagattttgcataaaaaacagactacataatactgtaaaacacaacatatgcagtcactatgaaccaactacttagatggtattagtgacctgtagaattcgagctctagagctgcagggcggccgcgatatcccctatagtgagtcgtattacatggtcatagctgtttcctggcagctctggcccgtgtctcaaaatctctgatgttacattgcacaagataaaaatatatcatcatgaacaataaaactgtctgcttacataaacagtaatacaaggggtgttatgagccatattcaacgggaaacgtcgaggccgcgattaaattccaacatggatgctgatttatatgggtataaatgggctcgcgataatgtcgggcaatcaggtgcgacaatctatcgcttgtatgggaagcccgatgcgccagagttgtttctgaaacatggcaaaggtagcgttgccaatgatgttacagatgagatggtcagactaaactggctgacggaatttatgcctcttccgaccatcaagcattttatccgtactcctgatgatgcatggttactcaccactgcgatccccggaaaaacagcattccaggtattagaagaatatcctgattcaggtgaaaatattgttgatgcgctggcagtgttcctgcgccggttgcattcgattcctgtttgtaattgtccttttaacagcgatcgcgtatttcgtctcgctcaggcgcaatcacgaatgaataacggtttggttgatgcgagtgattttgatgacgagcgtaatggctggcctgttgaacaagtctggaaagaaatgcataaacttttgccattctcaccggattcagtcgtcactcatggtgatttctcacttgataaccttatttttgacgaggggaaattaataggttgtattgatgttggacgagtcggaatcgcagaccgataccaggatcttgccatcctatggaactgcctcggtgagttttctccttcattacagaaacggctttttcaaaaatatggtattgataatcctgatatgaataaattgcagtttcatttgatgctcgatgagtttttctaatcagaattggttaattggttgtaacactggcagagcattacgctgacttgacgggacggcgcaagctcatgaccaaaatcccttaacgtgagttacgcgtcgttccactgagcgtcagaccccgtagaaaagatcaaaggatcttcttgagatcctttttttctgcgcgtaatctgctgcttgcaaacaaaaaaaccaccgctaccagcggtggtttgtttgccggatcaagagctaccaactctttttccgaaggtaactggcttcagcagagcgcagataccaaatactgttcttctagtgtagccgtagttaggccaccacttcaagaactctgtagcaccgcctacatacctcgctctgctaatcctgttaccagtggctgctgccagtggcgataagtcgtgtcttaccgggttggactcaagacgatagttaccggataaggcgcagcggtcgggctgaacggggggttcgtgcacacagcccagcttggagcgaacgacctacaccgaactgagatacctacagcgtgagctatgagaaagcgccacgcttcccgaagggagaaaggcggacaggtatccggtaagcggcagggtcggaacaggagagcgcacgagggagcttccagggggaaacgcctggtatctttatagtcctgtcgggtttcgccacctctgacttgagcgtcgatttttgtgatgctcgtcaggggggcggagcctatggaaaaacgccagcaacgcggcctttttacggttcctggccttttgctggccttttgctcacatgttctttcctgcgttatcccctgattctgtggataaccgtattaccgcctttgagtgagctgataccgctcgccgcagccgaacgaccgagcgcagcgagtcagtgagcgaggaagcggaagagcgcccaatacgcaaaccgcctctccccgcgcgttggccgattcattaatgcagctggcacgacaggtttcccgactggaaagcgggcagtgagcgcaacgcaattaatacgcgtaccgctagccaggaagagtttgtagaaacgcaaaaaggccatccgtcaggatggccttctgcttagtttgatgcctggcagtttatggcgggcgtcctgcccgccaccctccgggccgttgcttcacaacgttcaaatccgctcccggcggatttgtcctactcaggagagcgttcaccgacaaacaacagataaaacgaaagg

SEQ ID NO: 21 - DNA, 996 bp, Artificial
  Maize-codon-optimized LP-APH coding sequence
atgctcaagcaaccaattcaggcccagcagctcatcgagctcctcaaggtccactacggcatcgacatccacaccgcccagttcatccagggcggcgccgacaccaacgccttcgcctaccaggccgacagcgagagcaagtcctacttcataaagctaaaatacggctaccacgatgaaattaatctcagcatcatccgcctcctccacgactccggaataaaagagatcatcttccccatccacaccctcgaggccaagctcttccagcagctcaagcatttcaaaataattgcctaccccttcatccacgcccccaacggcttcacccagaacctcaccggcaagcagtggaagcagctcggcaaggtcctcaggcagatccatgaaacaagcgtccccatcagcatccagcagcaattaagaaaggagatctacagccccaagtggcgcgagatcgtccgcagcttctacaatcaaatcgagttcgacaacagcgacgacaagctcaccgccgccttcaagagcttcttcaaccaaaatagtgccgccatccacaggctagtcgacaccagcgagaagctcagcaagaagatccagcccgacctcgacaagtacgtcctctgccacagcgacatacatgccggcaacgtcctcgtcggcaacgaggagagcatctacatcatcgactgggacgagcccatgctcgcccccaaggagagggacctcatgttcatcggcggcggcgtcggcaacgtctggaataaaccccatgaaatccagtacttctacgagggctacggcgaaataaatgtcgataaaacaatcctcagctactacaggcacgagaggatcgtcgaggacatcgccgtctacggccaggacctcctcagccgcaatcaaaacaaccagagccgcctcgagagcttcaagtacttcaaggagatgttcgaccccaacaacgtcgtcgagatcgcgttcgcgacggagcagtag

SEQ ID NO: 22 - protein, 331 aa, Artificial; identical to SEQ ID NO: 16
  LP-APH (MO1) encoded protein sequence

SEQ ID NO: 23 - DNA, 996 bp, Artificial
  Soybean-codon-optimized LP-APH coding sequence
atgctcaagcaaccaattcaggcccagcagctcatcgagctcctcaaggtccactacggcatcgacatccacaccgcccagttcattcagggaggagccgacaccaacgctttcgcttaccaggccgactccgagtctaagtcttacttcataaagctaaaatacggctaccacgatgaaattaatctctccatcatcaggctcctgcacgactccggaataaaagagatcatcttccccatccacaccctcgaggccaagttgttccagcagctcaagcatttcaaaataattgcctaccccttcatccacgcccccaacggattcactcagaacctcaccggaaagcagtggaagcagctcggaaaggtcctcaggcagatccatgaaacatccgtccccatctctatccagcagcaattaagaaaggagatctactcccccaagtggagggagatcgtccgctccttctacaatcaaatcgagttcgacaactccgacgataagctcaccgccgccttcaagtctttcttcaaccaaaatagtgccgccatccacagactagtcgacacctccgagaagctctccaagaagatccagcccgacctcgacaagtacgtcttgtgccactccgacatacatgccggaaacgtcctcgtcggaaacgaggagtccatctacatcatcgactgggacgagcccatgttggctcctaaggagagagacctcatgttcatcggcggcggagtcggcaacgtctggaataaaccccatgaaatccagtacttctacgagggctacggcgaaataaatgtcgataaaacaatcctctcctactacagacacgagaggatcgtcgaggacatcgccgtctacggacaggacttgctctcccgcaatcaaaacaaccagtcccgcctcgagtccttcaagtacttcaaggagatgttcgaccccaacaacgtcgtcgagatcgccttcgccaccgagcagtag

SEQ ID NO: 24 - protein, 331 aa, Artificial; identical to SEQ ID NO: 16
  LP-APH (SO) encoded protein sequence

SEQ ID NO: 25 - DNA, 6393 bp, Artificial
  Synthetic construct comprising the T-DNA (RB to LB):  RB-GMUBQ PRO::GM-UBQ 5UTR::GM-UBQ INTRON1::CTP:SPCN::PINII TERM + DMMV PRO::TAGRFP::UBQ14 TERM + LB
caaacaaacatacacagcgatttattcacacgaacccgaattacaacggtatatatcctgtcagccaacaccaaaacatcaaaaaaatcgggatcaggatcaggatctgcggccgcatcctgcaggatctggccggccggatgggcggatctcgtacctcaactttgtatagaaaagttgggccgaattcgagctcggtacggccagaatggccatctggattcagcagggggtgattgcggttacatcatgtacggaaaaataattctaatccttgatttaaatttgaacttgactatttatttattctttatttcattttgtaaatcattttatgtatctcctggcaagcaattttatccaccttgcaccaacaccttcgggttccataatcaaaccaccttaacttcacaccatgctgtaactcacaccgcccagcatctccaatgtgaaagaagctaaaatttaataaacaatcatacgaagcagtgacaaaataccagatggtattaatgcttcgataaaattaattggaaagtataaaatggtagaaaataataaattataattaatttaagtaagataaaaaataattaaaaactaaaatgttaaaattttaaaaaaattattttaaataatatttaaaaacattaaaaatcattttaaaaaatttatttatagaacaattaaataaatatttcagctaataaaaaacaaaagcttacctagccttagaagacaacttgtccaacaattagatgatacccattgcccttacgttttctttaacatcaattattgtttttgtcaacaagctatcttttagttttattttattggtaaaaaatatgtcgccttcaagttgcatcatttaacacatctcgtcattagaaaaataaaactcttccctaaacgattagtagaaaaaatcattcgataataaataagaaagaaaaattagaaaaaaataacttcattttaaaaaaatcattaaggctatattttttaaatgactaattttatatagactgtaactaaaagtatacaatttattatgctatgtatcttaaagaattacttataaaaatctacggaagaatatcttacaaagtgaaaaacaaatgagaaagaatttagtgggatgattatgattttatttgaaaattgaaaaaataattattaaagactttagtggagtaagaaagctttcctattagtcttttcttatccataaaaaaaaaaaaaaaaatctagcgtgacagcttttccatagattttaataatgtaaaatactggtagcagccgaccgttcaggtaatggacactgtggtcctaacttgcaacgggtgcgggcccaatttaataacgccgtggtaacggataaagccaagcgtgaagcggtgaaggtacatctctgactccgtcaagattacgaaaccgtcaactacgaaggactccccgaaatatcatctgtgtcataaacaccaagtcacaccatacatgggcacgcgtcacaatatgattggagaacggttccaccgcatatgctataaaatgcccccacacccctcgaccctaatcgcacttcaattgcaatcaaattagttcattctctttgcgcagttccctacctctcctttcaaggttcgtagatttcttccgtttttttttcttcttctttattgtttgttctacatcagcatgatgttgatttgattgtgttttctatcgtttcatcgattataaattttcataatcagaagattcagcttttattaatgcaagaacgtccttaattgatgattttataaccgtaaattaggtctaattagagtttttttcataaagattttcagatccgtttacaacaagccttaattgttgattctgtagtcgtagattaaggtttttttcatgaactacttcagatccgttaaacaacagccttatttgttgatacttcagtcgtttttcaagaaattgttcagatccgttgataaaagccttattcgttgattctgtatggtatttcaagagatattgctcaggtcctttagcaactaccttatttgttgattctgtggccatagattaggattttttttcacgaaattgcttcttgaaattacgtgatggattttgattctgatttatcttgtgattgttgactctacagccatggctgcaactactcttacatctgctttacctggtgctttcagttcatcccagagaccaagtgctcctttcaacttacaaagatcacctagagtgcttagaaggttcaacagaaagacaggacgtcaacctcgtggacttgttcgtgctgcaaaggctcaagcggcgcaaaacctgccagagaaattcgatgaaacaagactctgggaggccctcaggggatttggggttagtccaagtagggttacttacgctcccgtcggattcggagattaccactggaccgtcacagatgaagacgggagaccttggttcgcaactgtcagtgacctcgaacacaaagagcattgcgggcagggagcacaagcagcccttaaaggactcagacaagctatggacactgccctcgcacttagagatagggacggactcagattcgtggttgctccagtggcagcaacagatgggggtggccctgtccttccccttgacgctaggtatgcactcacagtcttccctcacgtcccaggaagaacaggagagttcggacaaagactcacagaggcagagagggacagactgcttgctcttctggcagaactccacggaagaacacctcctgaaacaaccccaccagccgatatggaaccaccaggacttcctggtgttagagcagcactcgccgaaagtgaaggaccttggagtggaggaccatttgcagaacccgctagacttcttctcagagaacacgaggccacactgcacgcaagactcgctgaattcgaagccctcgtcgcaagagttaagggtcgtggagcacctcttgtcgttacccacggagaaccacacccaggcaacttgatcctcggagaggaaggctatctcctcgtggactgggatacagttggactggctccagctgaaagggatttgagtctcatctcagacgacccagctgacctcgcaagatacgcagagcttacaggaagaactccagacccagacgcactcgcactctatagactgcgttggagtctccttgatgtggctgagttcgtcgagtggttcagggctgaacaccaaagaacccaagacaccgagagtgcatggaaggggttcactgacacacttgggcaattggctgctggtggatcagctgcatagcctaggctagacttgtccatcttctggattggccaacttaattaatgtatgaaataaaaggatgcacacatagtgacatgctaatcactataatgtgggcatcaaagttgtgtgttatgtgtaattactagttatctgaataaaagagaaagagatcatccatatttcttatcctaaatgaatgtcacgtgtctttataattctttgatgaaccagatgcatttcattaaccaaatccatatacatataaatattaatcatatataattaatatcaattgggttagcaaaacaaatctagtctaggtgtgttttgccccggggtcggaggagactagccgttagttagtgcagaccgtctctaatcagtgactagcgacgtcccgacccacccagctttcttgtacaaagtggccgttaacggatcggccagaatggcccggaccgggttaccaagcggccgcccaattcgtcaacttcgtccacagacatcaacatcttatcgtcctttgaagataagataataatgttgaagataagagtgggagcccccactaaaacattgctttgtcaaaagctaaaaaagatgatgcccgacagccacttgtgtgaagcatgagaagccggtccctccactaagaaaattagtgaagcatcttccagtggtccctccactcacagctcaatcagtgagcaacaggacgaaggaaatgacgtaagccatgacgtctaatcccaacttcgtccacagacatcaacatcttatcgtcctttgaagataagataataatgttgaagataagagtgggagccaccactaaaacattgctttgtcaaaagctaaaaaagatgatgcccgacagccacttgtgtgaagcatgagaagccggtccctccactaagaaaattagtgaagcatcttccagtggtccctccactcacagctcaatcagtgagcaacaggacgaaggaaatgacgtaagccatgacgtctaatcccacaagaatttccttatataaggaacacaaatcagaaggaagagatcaatcgaaatcaaaatcggaatcgaaatcaaaatcggaatcgaaatctctcatctaagaggctggatccgccatggtgtccaagggggaggagctcattaaagagaacatgcacatgaagttatacatggagggcaccgtgaataatcaccacttcaagtgtacctctgagggtgagggcaagccctatgagggaacccagactatgagaatcaaggtggtcgaaggaggtccactcccattcgccttcgacatactagccacctccttcatgtacgggagtagaaccttcatcaaccacacccagggcatcccagacttcttcaaacagtcattcccagagggattcacctgggagagagtgaccacctacgaagacggaggagtcttgaccgccacccaagacactagtcttcaagacggctgcttgatctacaacgtcaagatccgcggcgtgaacttcccatcaaacggtcccgtgatgcagaagaagactctcggctgggaagccaatactgaaatgctttacccagccgacggtggtcttgaaggtagatccgacatggccttgaagcttgtcggcggaggccatctcatctgtaacttcaagaccacctaccgctccaaaaagcctgccaaaaacttgaaaatgcccggcgtgtattacgtggaccatagactcgagcgcataaaagaggccgacaaggagacttatgtggagcagcacgaggtggccgtcgctagatattgcgacttgccatcaaagcttggccacaaactgaattagttcgaatgttaaccggtaccaaacttatctctgttatgaatcagaagaagttcatgtctcgtttcatttaaaactttggtggtttgtgttttggggccttgtaaagcccctgatgaataattgttcaactatgtttccgttcctgtgttatacctttctttctaatgagtaatgacatcaaacttcttctgtattgaaattatgtccttgtgagtctctttatcatcgtttcgtctttacattatatgtgctacttttgtctaatgagcctgaaaagtggctccaatggtacgcactggaagatttgttggcttctggtagatatagcgacagtgttgagcttgtaatatcatgtctcttattgctaaattagttcctttcttaacagaaaccttcaaagtttttgtttttgttttcatttacctaatgtacacatacgctggccatgactaacaacatgtccaggcttagagcatatttttttctagcttaaattgttaacttgtcattcagtaaaatccgagaattgtgaagctctaattgaagctaattcgttttataaagtcagttaaaaagtatactaaattatccaacttttcttcaaaatctcaaaattctatgacaaaacgatagtctttgtttatgtcagtaccacaaagaggtggaaaaaaacaccaaaaaaacaataagcaaactatacactgagaagaaaaataaaagagagctcaatagatgttttatactaacggtagattagatcaaagatccaagctttactctacatagagcagaacccagaatcccttcatatctcttttattctagcaccgataatctactgaaaagaagacacttagagctctgtctctttgtcaaagaagtcccagccgtcatccagaagctccttacgttcattaacagaggcgcgccggtcacccggtccgggcctagaaggccacccggggcacttaggagcgaagactaacggttagctagggctgatacctaaaccttagtcactagcagcgtctactagcccccaactttattatacaaagttgatagattgtatgaattcatttacaattgaatatatcctgccattttacacctcgatatatcctgccacaaattccatgtacacagtacattaaaaacgtccgcaatgtgttattaagttgtctaagcgtcaatttgtttacaccacaatatatcctgcca

SEQ ID NO: 26 - DNA, 7702 bp, Artificial
  Synthetic construct comprising the T-DNA (RB to LB):  RB + GM-UBQ PRO-V1::GM-UBQ 5' UTR::GM-UBQ INTRON1::TAGRFP::UBQ3 TERM + GM-SAMS PRO:: GM-SAMS  5' UTR:: GM-SAMS INTRON1::CTP::APH::UBQ14 TERM + LB
aattacaacggtatatatcctgtcagccaacaccaaaacatcaaaaaaatcgggatcaggatcaggatctgcggccgcatcctgcaggatctggccggccggatgggcggatctcgtacctcaactttgtatagaaaagttgggccgaattcgagctcggtacggccagaatccggtaagtgactagggtcacgtgaccctagtcacttaaattcggccagaatggccatctggattcagcagggtgaccctagtcacttaaattcggccagaatggccatctggattcagcagggggtgattgcggttacatcatgtacggaaaaataattctaatccttgatttaaatttgaacttgactatttatttattctttatttcattttgtaaatcattttatgtatctcctggcaagcaattttatccaccttgcaccaacaccttcgggttccataatcaaaccaccttaacttcacaccatgctgtaactcacaccgcccagcatctccaatgtgaaagaagctaaaatttaataaacaatcatacgaagcagtgacaaaataccagatggtattaatgcttcgataaaattaattggaaagtataaaatggtagaaaataataaattataattaatttaagtaagataaaaaataattaaaaactaaaatgttaaaattttaaaaaaattattttaaataatatttaaaaacattaaaaatcattttaaaaaatttatttatagaacaattaaataaatatttcagctaataaaaaacaaaagcttacctagccttagaagacaacttgtccaacaattagatgatacccattgcccttacgttttctttaacatcaattattgtttttgtcaacaagctatcttttagttttattttattggtaaaaaatatgtcgccttcaagttgcatcatttaacacatctcgtcattagaaaaataaaactcttccctaaacgattagtagaaaaaatcattcgataataaataagaaagaaaaattagaaaaaaataacttcattttaaaaaaatcattaaggctatattttttaaatgactaattttatatagactgtaactaaaagtatacaatttattatgctatgtatcttaaagaattacttataaaaatctacggaagaatatcttacaaagtgaaaaacaaatgagaaagaatttagtgggatgattatgattttatttgaaaattgaaaaaataattattaaagactttagtggagtaagaaagctttcctattagtcttttcttatccataaaaaaaaaaaaaaaaatctagcgtgacagcttttccatagattttaataatgtaaaatactggtagcagccgaccgttcaggtaatggacactgtggtcctaacttgcaacgggtgcgggcccaatttaataacgccgtggtaacggataaagccaagcgtgaagcggtgaaggtacatctctgactccgtcaagattacgaaaccgtcaactacgaaggactccccgaaatatcatctgtgtcataaacaccaagtcacaccatacatgggcacgcgtcacaatatgattggagaacggttccaccgcatatgctataaaatgcccccacacccctcgaccctaatcgcacttcaattgcaatcaaattagttcattctctttgcgcagttccctacctctcctttcaaggttcgtagatttcttccgtttttttttcttcttctttattgtttgttctacatcagcatgatgttgatttgattgtgttttctatcgtttcatcgattataaattttcataatcagaagattcagcttttattaatgcaagaacgtccttaattgatgattttataaccgtaaattaggtctaattagagtttttttcataaagattttcagatccgtttacaacaagccttaattgttgattctgtagtcgtagattaaggtttttttcatgaactacttcagatccgttaaacaacagccttatttgttgatacttcagtcgtttttcaagaaattgttcagatccgttgataaaagccttattcgttgattctgtatggtatttcaagagatattgctcaggtcctttagcaactaccttatttgttgattctgtggccatagattaggattttttttcacgaaattgcttcttgaaattacgtgatggattttgattctgatttatcttgtgattgttgactctacagccatggtgtccaagggggaggagctcattaaagagaacatgcacatgaagttatacatggagggcaccgtgaataatcaccacttcaagtgtacctctgagggtgagggcaagccctatgagggaacccagactatgagaatcaaggtggtcgaaggaggtccactcccattcgccttcgacatactagccacctccttcatgtacgggagtagaaccttcatcaaccacacccagggcatcccagacttcttcaaacagtcattcccagagggattcacctgggagagagtgaccacctacgaagacggaggagtcttgaccgccacccaagacactagtcttcaagacggctgcttgatctacaacgtcaagatccgcggcgtgaacttcccatcaaacggtcccgtgatgcagaagaagactctcggctgggaagccaatactgaaatgctttacccagccgacggtggtcttgaaggtagatccgacatggccttgaagcttgtcggcggaggccatctcatctgtaacttcaagaccacctaccgctccaaaaagcctgccaaaaacttgaaaatgcccggcgtgtattacgtggaccatagactcgagcgcataaaagaggccgacaaggagacttatgtggagcagcacgaggtggccgtcgctagatattgcgacttgccatcaaagcttggccacaaactgaattaggcgatcgctagatctttgagctcttttgtgatctgatgataagtggttggttcgtgtctcatgcacttgggaggtgatctatttcacctggtgtagtttgtgtttccgtcagttggaaaaacttatccctatcgatttcgttttcattttctgcttttcttttatgtaccttcgtttgggcttgtaacgggcctttgtatttcaactctcaataataatccaagtgcatgttaaacaatttgtcatctgtttcggctttgatatactactggtgaagatgggccgtactactgcatcacaacgaaaaataataataagatgaaaaacttgaagtggaaaaaaaaaaaaacttgaatgttcactactactcattgaccataatgtttaacatacatagctcaatagtatttttgtgaatatggcaacacaaacagtccaaaacaattgtctcttactataccaaaccaagggcgccgcttgtttgccactctttgtgtgcaatagtgtgattaccacatctccacattcaatatattccctgaattatctgacgattttgatggctcactgttttcccaagtcttgaattgtcttctgtgcgccagtcaaatgcatatgtgttgagtttatcttttaaatatcaagcttttgtttttaacttttgtttgtaaccaaaaactcacagtaggagtttgatcacataattttatgtttgcctttgcaatttctagtgagtctttgattaaaagcttgaaaagaaaatgcagccaagcttaccaagtaagttatgtgtattaaccagaggaagagagaatcttgcaaaatttcaacaaacacaaaaagaagtattactacgattggtggagaaagaaaacgattccaaatcttgaactgttgttgtaaaagcatagcagaaagtgggagacaaccgaaatagaaatgactataacttaatttaatgttatcattataatttcttctagcaaatatttagaaagtaaatatcacatcaacctttaatgtaattaagctttctctttttgattcatgtgagatgaaaagaaaaaaaagaagagaaaagtgtagaaaacacatcatttctaagctgaaggttaaccccgggcacccagctttcttgtacaaagtgggccagaatggcccgggctctagatcaaactcacatccaaacataacatggatatcttccttaccaatcatactaattattttgggttaaatattaatcattatttttaagatattaattaagaaattaaaagattttttaaaaaaatgtataaaattatattattcatgatttttcatacatttgattttgataataaatatattttttttaatttcttaaaaaatgttgcaagacacttattagacatagtcttgttctgtttacaaaagcattcatcatttaatacattaaaaaatatttaatactaacagtagaatcttcttgtgagtggtgtgggagtaggcaacctggcattgaaacgagagaaagagagtcagaaccagaagacaaataaaaagtatgcaacaaacaaatcaaaatcaaagggcaaaggctggggttggctcaattggttgctacattcaattttcaactcagtcaacggttgagattcactctgacttccccaatctaagccgcggatgcaaacggttgaatctaacccacaatccaatctcgttacttaggggcttttccgtcattaactcacccctgccacccggtttccctataaattggaactcaatgctcccctctaaactcgtatcgcttcagagttgagaccaagacacactcgttcatatatctctctgctcttctcttctcttctacctctcaaggtacttttcttctccctctaccaaatcctagattccgtggttcaatttcggatcttgcacttctggtttgctttgccttgctttttcctcaactgggtccatctaggatccatgtgaaactctactctttctttaatatctgcggaatacgcgtttgactttcagatctagtcgaaatcatttcataattgcctttctttcttttagcttatgagaaataaaatcactttttttttatttcaaaataaaccttgggccttgtgctgactgagatggggtttggtgattacagaattttagcgaattttgtaattgtacttgtttgtctgtagttttgttttgttttcttgtttctcatacattccttaggcttcaattttattcgagtataggtcacaataggaattcaaactttgagcaggggaattaatcccttccttcaaatccagtttgtttgtatatatgtttaaaaaatgaaacttttgctttaaattctattataactttttttatggctgaaatttttgcatgtgtctttgctctctgttgtaaatttactgtttaggtactaactctaggcttgttgtgcagtttttgaagtataacccatggctgcaactactcttacatctgctttacctggtgctttcagttcatcccagagaccaagtgctcctttcaacttacaaagatcacctagagtgcttagaaggttcaacagaaagacaggacgtcaacctcgtggacttgttcgtgctgcaaaggctcaagcggcgttgaagcaaccaattcaggctcagcagctcatcgagctcttgaaggtccactacggaatcgacatccacaccgctcagttcattcagggaggagccgacactaacgctttcgcttaccaggccgactctgagtctaagtcttacttcataaagctaaaatacggctaccacgatgaaattaatctctccatcatcagactcctccacgactccggaataaaagagatcatcttccccatccacaccctcgaggctaagttgttccagcagctcaagcatttcaaaataattgcctaccccttcattcacgctcccaacggattcactcagaacctcactggaaagcagtggaagcagctcggaaaggtcctcagacagatccatgaaacatccgtccccatctccatccagcagcaattaagaaaggagatctactcccccaagtggagagagatcgtcaggtccttctacaatcaaatcgagttcgacaactccgacgacaagctcaccgccgctttcaagtctttcttcaaccaaaatagtgccgctatccacagactagtcgacacttccgagaagctctccaagaagattcagcccgacttggacaagtacgtcttgtgccactccgacatacatgctggaaacgtcttggtcggaaacgaggagtccatctacattattgactgggacgagcctatgttggctcctaaggagagagacctcatgttcatcggaggcggcgtcggcaacgtctggaataaacctcatgaaatccagtacttctacgagggatacggagaaataaatgtcgataaaacaatcctctcctactacagacacgagagaatcgtcgaggacatcgctgtctacggacaggacttgctctccagaaatcaaaacaaccagtccaggctcgagtccttcaagtacttcaaggagatgttcgaccccaacaacgtcgtcgagatcgctttcgctactgagcagtagcctaggaaacttatctctgttatgaatcagaagaagttcatgtctcgtttcatttaaaactttggtggtttgtgttttggggccttgtaaagcccctgatgaataattgttcaactatgtttccgttcctgtgttatacctttctttctaatgagtaatgacatcaaacttcttctgtattgaaattatgtccttgtgagtctctttatcatcgtttcgtctttacattatatgtgctacttttgtctaatgagcctgaaaagtggctccaatggtacgcactggaagatttgttggcttctggtagatatagcgacagtgttgagcttgtaatatcatgtctcttattgctaaattagttcctttcttaacagaaaccttcaaagtttttgtttttgttttcatttacctaatgtacacatacgctggccatgactaacaacatgtccaggcttagagcatatttttttctagcttaaattgttaacttgtcattcagtaaaatccgagaattgtgaagctctaattgaagctaattcgttttataaagtcagttaaaaagtatactaaattatccaacttttcttcaaaatctcaaaattctatgacaaaacgatagtctttgtttatgtcagtaccacaaagaggtggaaaaaaacaccaaaaaaacaataagcaaactatacactgagaagaaaaataaaagagagctcaatagatgttttatactaacggtagattagatcaaagatccaagctttactctacatagagcagaacccagaatcccttcatatctcttttattctagcaccgataatctactgaaaagaagacacttagagctctgtctctttgtcaaagaagtcccagccgtcatccagaagctccttacgttcattaacagaggtaccggcggccgcgggcaactttattatacaaagttgatagattgtatgaattcatttacaattgaatatatcctgccattttacacctcgatatatcctgccacaaattccatgtacacagtacattaaaaacgtccgcaatgtgttattaagttgtctaagcgtcaatttgtttacaccacaatatatcctgcca

SEQ ID NO: 27 - DNA, 7707 bp, Artificial
  Synthetic construct comprising the T-DNA (RB to LB):  RB + GM-UBQ PRO-V1::GM-UBQ 5' UTR::GM-UBQ INTRON1::TAGRFP::UBQ3 TERM + AT-UBIQ10 PRO:: AT-UBIQ10 5' UTR:: AT-UBIQ10 INTRON1::CTP::APH::UBQ14 TERM + LB
aattacaacggtatatatcctgtcagccaacaccaaaacatcaaaaaaatcgggatcaggatcaggatctgcggccgcatcctgcaggatctggccggccggatgggcggatctcgtacctcaactttgtatagaaaagttgggccgaattcgagctcggtacggccagaatccggtaagtgactagggtcacgtgaccctagtcacttaaattcggccagaatggccatctggattcagcagggtgaccctagtcacttaaattcggccagaatggccatctggattcagcagggggtgattgcggttacatcatgtacggaaaaataattctaatccttgatttaaatttgaacttgactatttatttattctttatttcattttgtaaatcattttatgtatctcctggcaagcaattttatccaccttgcaccaacaccttcgggttccataatcaaaccaccttaacttcacaccatgctgtaactcacaccgcccagcatctccaatgtgaaagaagctaaaatttaataaacaatcatacgaagcagtgacaaaataccagatggtattaatgcttcgataaaattaattggaaagtataaaatggtagaaaataataaattataattaatttaagtaagataaaaaataattaaaaactaaaatgttaaaattttaaaaaaattattttaaataatatttaaaaacattaaaaatcattttaaaaaatttatttatagaacaattaaataaatatttcagctaataaaaaacaaaagcttacctagccttagaagacaacttgtccaacaattagatgatacccattgcccttacgttttctttaacatcaattattgtttttgtcaacaagctatcttttagttttattttattggtaaaaaatatgtcgccttcaagttgcatcatttaacacatctcgtcattagaaaaataaaactcttccctaaacgattagtagaaaaaatcattcgataataaataagaaagaaaaattagaaaaaaataacttcattttaaaaaaatcattaaggctatattttttaaatgactaattttatatagactgtaactaaaagtatacaatttattatgctatgtatcttaaagaattacttataaaaatctacggaagaatatcttacaaagtgaaaaacaaatgagaaagaatttagtgggatgattatgattttatttgaaaattgaaaaaataattattaaagactttagtggagtaagaaagctttcctattagtcttttcttatccataaaaaaaaaaaaaaaaatctagcgtgacagcttttccatagattttaataatgtaaaatactggtagcagccgaccgttcaggtaatggacactgtggtcctaacttgcaacgggtgcgggcccaatttaataacgccgtggtaacggataaagccaagcgtgaagcggtgaaggtacatctctgactccgtcaagattacgaaaccgtcaactacgaaggactccccgaaatatcatctgtgtcataaacaccaagtcacaccatacatgggcacgcgtcacaatatgattggagaacggttccaccgcatatgctataaaatgcccccacacccctcgaccctaatcgcacttcaattgcaatcaaattagttcattctctttgcgcagttccctacctctcctttcaaggttcgtagatttcttccgtttttttttcttcttctttattgtttgttctacatcagcatgatgttgatttgattgtgttttctatcgtttcatcgattataaattttcataatcagaagattcagcttttattaatgcaagaacgtccttaattgatgattttataaccgtaaattaggtctaattagagtttttttcataaagattttcagatccgtttacaacaagccttaattgttgattctgtagtcgtagattaaggtttttttcatgaactacttcagatccgttaaacaacagccttatttgttgatacttcagtcgtttttcaagaaattgttcagatccgttgataaaagccttattcgttgattctgtatggtatttcaagagatattgctcaggtcctttagcaactaccttatttgttgattctgtggccatagattaggattttttttcacgaaattgcttcttgaaattacgtgatggattttgattctgatttatcttgtgattgttgactctacagccatggtgtccaagggggaggagctcattaaagagaacatgcacatgaagttatacatggagggcaccgtgaataatcaccacttcaagtgtacctctgagggtgagggcaagccctatgagggaacccagactatgagaatcaaggtggtcgaaggaggtccactcccattcgccttcgacatactagccacctccttcatgtacgggagtagaaccttcatcaaccacacccagggcatcccagacttcttcaaacagtcattcccagagggattcacctgggagagagtgaccacctacgaagacggaggagtcttgaccgccacccaagacactagtcttcaagacggctgcttgatctacaacgtcaagatccgcggcgtgaacttcccatcaaacggtcccgtgatgcagaagaagactctcggctgggaagccaatactgaaatgctttacccagccgacggtggtcttgaaggtagatccgacatggccttgaagcttgtcggcggaggccatctcatctgtaacttcaagaccacctaccgctccaaaaagcctgccaaaaacttgaaaatgcccggcgtgtattacgtggaccatagactcgagcgcataaaagaggccgacaaggagacttatgtggagcagcacgaggtggccgtcgctagatattgcgacttgccatcaaagcttggccacaaactgaattaggcgatcgctagatctttgagctcttttgtgatctgatgataagtggttggttcgtgtctcatgcacttgggaggtgatctatttcacctggtgtagtttgtgtttccgtcagttggaaaaacttatccctatcgatttcgttttcattttctgcttttcttttatgtaccttcgtttgggcttgtaacgggcctttgtatttcaactctcaataataatccaagtgcatgttaaacaatttgtcatctgtttcggctttgatatactactggtgaagatgggccgtactactgcatcacaacgaaaaataataataagatgaaaaacttgaagtggaaaaaaaaaaaaacttgaatgttcactactactcattgaccataatgtttaacatacatagctcaatagtatttttgtgaatatggcaacacaaacagtccaaaacaattgtctcttactataccaaaccaagggcgccgcttgtttgccactctttgtgtgcaatagtgtgattaccacatctccacattcaatatattccctgaattatctgacgattttgatggctcactgttttcccaagtcttgaattgtcttctgtgcgccagtcaaatgcatatgtgttgagtttatcttttaaatatcaagcttttgtttttaacttttgtttgtaaccaaaaactcacagtaggagtttgatcacataattttatgtttgcctttgcaatttctagtgagtctttgattaaaagcttgaaaagaaaatgcagccaagcttaccaagtaagttatgtgtattaaccagaggaagagagaatcttgcaaaatttcaacaaacacaaaaagaagtattactacgattggtggagaaagaaaacgattccaaatcttgaactgttgttgtaaaagcatagcagaaagtgggagacaaccgaaatagaaatgactataacttaatttaatgttatcattataatttcttctagcaaatatttagaaagtaaatatcacatcaacctttaatgtaattaagctttctctttttgattcatgtgagatgaaaagaaaaaaaagaagagaaaagtgtagaaaacacatcatttctaagctgaaggttaaccccgggcacccagctttcttgtacaaagtggccgttaacggatctggccgcggccgcatcaggatattcttgtttaagatgttgaactctatggaggtttgtatgaactgatgatctaggaccggataagttcccttcttcatagcgaacttattcaaagaatgttttgtgtatcattcttgttacattgttattaatgaaaaaatattattggtcattggactgaacacgagtgttaaatatggaccaggccccaaataagatccattgatatatgaattaaataacaagaataaatcgagtcaccaaaccacttgccttttttaacgagacttgttcaccaacttgatacaaaagtcattatcctatgcaaatcaataatcatacaaaaatatccaataacactaaaaaattaaaagaaatggataatttcacaatatgttatacgataaagaagttacttttccaagaaattcactgattttataagcccacttgcattagataaatggcaaaaaaaaacaaaaaggaaaagaaataaagcacgaagaattctagaaaatacgaaatacgcttcaatgcagtgggacccacggttcaattattgccaattttcagctccaccgtatatttaaaaaataaaacgataatgctaaaaaaatataaatcgtaacgatcgttaaatctcaacggctggatcttatgacgaccgttagaaattgtggttgtcgacgagtcagtaataaacggcgtcaaagtggttgcagccggcacacacgagtcgtgtttatcaactcaaagcacaaatacttttcctcaacctaaaaataaggcaattagccaaaaacaactttgcgtgtaaacaacgctcaatacacgtgtcattttattattagctattgcttcaccgccttagctttctcgtgacctagtcgtcctcgtcttttcttcttcttcttctataaaacaatacccaaagagctcttcttcttcacaattcagatttcaatttctcaaaatcttaaaaactttctctcaattctctctaccgtgatcaaggtaaatttctgtgttccttattctctcaaaatcttcgattttgttttcgttcgatcccaatttcgtatatgttctttggtttagattctgttaatcttagatcgaagacgattttctgggtttgatcgttagatatcatcttaattctcgattagggtttcatagatatcatccgatttgttcaaataatttgagttttgtcgaataattactcttcgatttgtgatttctatctagatctggtgttagtttctagtttgtgcgatcgaatttgtcgattaatctgagtttttctgattaacagccatggctgcaactactcttacatctgctttacctggtgctttcagttcatcccagagaccaagtgctcctttcaacttacaaagatcacctagagtgcttagaaggttcaacagaaagacaggacgtcaacctcgtggacttgttcgtgctgcaaaggctcaagcggcgttgaagcaaccaattcaggctcagcagctcatcgagctcttgaaggtccactacggaatcgacatccacaccgctcagttcattcagggaggagccgacactaacgctttcgcttaccaggccgactctgagtctaagtcttacttcataaagctaaaatacggctaccacgatgaaattaatctctccatcatcagactcctccacgactccggaataaaagagatcatcttccccatccacaccctcgaggctaagttgttccagcagctcaagcatttcaaaataattgcctaccccttcattcacgctcccaacggattcactcagaacctcactggaaagcagtggaagcagctcggaaaggtcctcagacagatccatgaaacatccgtccccatctccatccagcagcaattaagaaaggagatctactcccccaagtggagagagatcgtcaggtccttctacaatcaaatcgagttcgacaactccgacgacaagctcaccgccgctttcaagtctttcttcaaccaaaatagtgccgctatccacagactagtcgacacttccgagaagctctccaagaagattcagcccgacttggacaagtacgtcttgtgccactccgacatacatgctggaaacgtcttggtcggaaacgaggagtccatctacattattgactgggacgagcctatgttggctcctaaggagagagacctcatgttcatcggaggcggcgtcggcaacgtctggaataaacctcatgaaatccagtacttctacgagggatacggagaaataaatgtcgataaaacaatcctctcctactacagacacgagagaatcgtcgaggacatcgctgtctacggacaggacttgctctccagaaatcaaaacaaccagtccaggctcgagtccttcaagtacttcaaggagatgttcgaccccaacaacgtcgtcgagatcgctttcgctactgagcagtagcctaggaaacttatctctgttatgaatcagaagaagttcatgtctcgtttcatttaaaactttggtggtttgtgttttggggccttgtaaagcccctgatgaataattgttcaactatgtttccgttcctgtgttatacctttctttctaatgagtaatgacatcaaacttcttctgtattgaaattatgtccttgtgagtctctttatcatcgtttcgtctttacattatatgtgctacttttgtctaatgagcctgaaaagtggctccaatggtacgcactggaagatttgttggcttctggtagatatagcgacagtgttgagcttgtaatatcatgtctcttattgctaaattagttcctttcttaacagaaaccttcaaagtttttgtttttgttttcatttacctaatgtacacatacgctggccatgactaacaacatgtccaggcttagagcatatttttttctagcttaaattgttaacttgtcattcagtaaaatccgagaattgtgaagctctaattgaagctaattcgttttataaagtcagttaaaaagtatactaaattatccaacttttcttcaaaatctcaaaattctatgacaaaacgatagtctttgtttatgtcagtaccacaaagaggtggaaaaaaacaccaaaaaaacaataagcaaactatacactgagaagaaaaataaaagagagctcaatagatgttttatactaacggtagattagatcaaagatccaagctttactctacatagagcagaacccagaatcccttcatatctcttttattctagcaccgataatctactgaaaagaagacacttagagctctgtctctttgtcaaagaagtcccagccgtcatccagaagctccttacgttcattaacagaggtaccggcggccgcgggcaactttattatacaaagttgatagattgtatgaattcatttacaattgaatatatcctgccattttacacctcgatatatcctgccacaaattccatgtacacagtacattaaaaacgtccgcaatgtgttattaagttgtctaagcgtcaatttgtttacaccacaatatatcctgcca

SEQ ID NO: 28 - DNA, 7705 bp, Artificial
  Synthetic construct comprising the T-DNA (RB to LB):  RB + GM-UBQ PRO-V1::GM-UBQ 5' UTR::GM-UBQ INTRON1::TAGRFP::UBQ3 TERM + GM-SAMS  PRO:: GM-SAMS  5' UTR:: GM-SAMS INTRON1::CTP::SPCN::UBQ14 TERM + LB
aattacaacggtatatatcctgtcagccaacaccaaaacatcaaaaaaatcgggatcaggatcaggatctgcggccgcatcctgcaggatctggccggccggatgggcggatctcgtacctcaactttgtatagaaaagttgggccgaattcgagctcggtacggccagaatccggtaagtgactagggtcacgtgaccctagtcacttaaattcggccagaatggccatctggattcagcagggtgaccctagtcacttaaattcggccagaatggccatctggattcagcagggggtgattgcggttacatcatgtacggaaaaataattctaatccttgatttaaatttgaacttgactatttatttattctttatttcattttgtaaatcattttatgtatctcctggcaagcaattttatccaccttgcaccaacaccttcgggttccataatcaaaccaccttaacttcacaccatgctgtaactcacaccgcccagcatctccaatgtgaaagaagctaaaatttaataaacaatcatacgaagcagtgacaaaataccagatggtattaatgcttcgataaaattaattggaaagtataaaatggtagaaaataataaattataattaatttaagtaagataaaaaataattaaaaactaaaatgttaaaattttaaaaaaattattttaaataatatttaaaaacattaaaaatcattttaaaaaatttatttatagaacaattaaataaatatttcagctaataaaaaacaaaagcttacctagccttagaagacaacttgtccaacaattagatgatacccattgcccttacgttttctttaacatcaattattgtttttgtcaacaagctatcttttagttttattttattggtaaaaaatatgtcgccttcaagttgcatcatttaacacatctcgtcattagaaaaataaaactcttccctaaacgattagtagaaaaaatcattcgataataaataagaaagaaaaattagaaaaaaataacttcattttaaaaaaatcattaaggctatattttttaaatgactaattttatatagactgtaactaaaagtatacaatttattatgctatgtatcttaaagaattacttataaaaatctacggaagaatatcttacaaagtgaaaaacaaatgagaaagaatttagtgggatgattatgattttatttgaaaattgaaaaaataattattaaagactttagtggagtaagaaagctttcctattagtcttttcttatccataaaaaaaaaaaaaaaaatctagcgtgacagcttttccatagattttaataatgtaaaatactggtagcagccgaccgttcaggtaatggacactgtggtcctaacttgcaacgggtgcgggcccaatttaataacgccgtggtaacggataaagccaagcgtgaagcggtgaaggtacatctctgactccgtcaagattacgaaaccgtcaactacgaaggactccccgaaatatcatctgtgtcataaacaccaagtcacaccatacatgggcacgcgtcacaatatgattggagaacggttccaccgcatatgctataaaatgcccccacacccctcgaccctaatcgcacttcaattgcaatcaaattagttcattctctttgcgcagttccctacctctcctttcaaggttcgtagatttcttccgtttttttttcttcttctttattgtttgttctacatcagcatgatgttgatttgattgtgttttctatcgtttcatcgattataaattttcataatcagaagattcagcttttattaatgcaagaacgtccttaattgatgattttataaccgtaaattaggtctaattagagtttttttcataaagattttcagatccgtttacaacaagccttaattgttgattctgtagtcgtagattaaggtttttttcatgaactacttcagatccgttaaacaacagccttatttgttgatacttcagtcgtttttcaagaaattgttcagatccgttgataaaagccttattcgttgattctgtatggtatttcaagagatattgctcaggtcctttagcaactaccttatttgttgattctgtggccatagattaggattttttttcacgaaattgcttcttgaaattacgtgatggattttgattctgatttatcttgtgattgttgactctacagccatggtgtccaagggggaggagctcattaaagagaacatgcacatgaagttatacatggagggcaccgtgaataatcaccacttcaagtgtacctctgagggtgagggcaagccctatgagggaacccagactatgagaatcaaggtggtcgaaggaggtccactcccattcgccttcgacatactagccacctccttcatgtacgggagtagaaccttcatcaaccacacccagggcatcccagacttcttcaaacagtcattcccagagggattcacctgggagagagtgaccacctacgaagacggaggagtcttgaccgccacccaagacactagtcttcaagacggctgcttgatctacaacgtcaagatccgcggcgtgaacttcccatcaaacggtcccgtgatgcagaagaagactctcggctgggaagccaatactgaaatgctttacccagccgacggtggtcttgaaggtagatccgacatggccttgaagcttgtcggcggaggccatctcatctgtaacttcaagaccacctaccgctccaaaaagcctgccaaaaacttgaaaatgcccggcgtgtattacgtggaccatagactcgagcgcataaaagaggccgacaaggagacttatgtggagcagcacgaggtggccgtcgctagatattgcgacttgccatcaaagcttggccacaaactgaattaggcgatcgctagatctttgagctcttttgtgatctgatgataagtggttggttcgtgtctcatgcacttgggaggtgatctatttcacctggtgtagtttgtgtttccgtcagttggaaaaacttatccctatcgatttcgttttcattttctgcttttcttttatgtaccttcgtttgggcttgtaacgggcctttgtatttcaactctcaataataatccaagtgcatgttaaacaatttgtcatctgtttcggctttgatatactactggtgaagatgggccgtactactgcatcacaacgaaaaataataataagatgaaaaacttgaagtggaaaaaaaaaaaaacttgaatgttcactactactcattgaccataatgtttaacatacatagctcaatagtatttttgtgaatatggcaacacaaacagtccaaaacaattgtctcttactataccaaaccaagggcgccgcttgtttgccactctttgtgtgcaatagtgtgattaccacatctccacattcaatatattccctgaattatctgacgattttgatggctcactgttttcccaagtcttgaattgtcttctgtgcgccagtcaaatgcatatgtgttgagtttatcttttaaatatcaagcttttgtttttaacttttgtttgtaaccaaaaactcacagtaggagtttgatcacataattttatgtttgcctttgcaatttctagtgagtctttgattaaaagcttgaaaagaaaatgcagccaagcttaccaagtaagttatgtgtattaaccagaggaagagagaatcttgcaaaatttcaacaaacacaaaaagaagtattactacgattggtggagaaagaaaacgattccaaatcttgaactgttgttgtaaaagcatagcagaaagtgggagacaaccgaaatagaaatgactataacttaatttaatgttatcattataatttcttctagcaaatatttagaaagtaaatatcacatcaacctttaatgtaattaagctttctctttttgattcatgtgagatgaaaagaaaaaaaagaagagaaaagtgtagaaaacacatcatttctaagctgaaggttaaccccgggcacccagctttcttgtacaaagtgggccagaatggcccgggctctagatcaaactcacatccaaacataacatggatatcttccttaccaatcatactaattattttgggttaaatattaatcattatttttaagatattaattaagaaattaaaagattttttaaaaaaatgtataaaattatattattcatgatttttcatacatttgattttgataataaatatattttttttaatttcttaaaaaatgttgcaagacacttattagacatagtcttgttctgtttacaaaagcattcatcatttaatacattaaaaaatatttaatactaacagtagaatcttcttgtgagtggtgtgggagtaggcaacctggcattgaaacgagagaaagagagtcagaaccagaagacaaataaaaagtatgcaacaaacaaatcaaaatcaaagggcaaaggctggggttggctcaattggttgctacattcaattttcaactcagtcaacggttgagattcactctgacttccccaatctaagccgcggatgcaaacggttgaatctaacccacaatccaatctcgttacttaggggcttttccgtcattaactcacccctgccacccggtttccctataaattggaactcaatgctcccctctaaactcgtatcgcttcagagttgagaccaagacacactcgttcatatatctctctgctcttctcttctcttctacctctcaaggtacttttcttctccctctaccaaatcctagattccgtggttcaatttcggatcttgcacttctggtttgctttgccttgctttttcctcaactgggtccatctaggatccatgtgaaactctactctttctttaatatctgcggaatacgcgtttgactttcagatctagtcgaaatcatttcataattgcctttctttcttttagcttatgagaaataaaatcactttttttttatttcaaaataaaccttgggccttgtgctgactgagatggggtttggtgattacagaattttagcgaattttgtaattgtacttgtttgtctgtagttttgttttgttttcttgtttctcatacattccttaggcttcaattttattcgagtataggtcacaataggaattcaaactttgagcaggggaattaatcccttccttcaaatccagtttgtttgtatatatgtttaaaaaatgaaacttttgctttaaattctattataactttttttatggctgaaatttttgcatgtgtctttgctctctgttgtaaatttactgtttaggtactaactctaggcttgttgtgcagtttttgaagtataacccatggctgcaactactcttacatctgctttacctggtgctttcagttcatcccagagaccaagtgctcctttcaacttacaaagatcacctagagtgcttagaaggttcaacagaaagacaggacgtcaacctcgtggacttgttcgtgctgcaaaggctcaagcggcgcaaaacctgccagagaaattcgatgaaacaagactctgggaggccctcaggggatttggggttagtccaagtagggttacttacgctcccgtcggattcggagattaccactggaccgtcacagatgaagacgggagaccttggttcgcaactgtcagtgacctcgaacacaaagagcattgcgggcagggagcacaagcagcccttaaaggactcagacaagctatggacactgccctcgcacttagagatagggacggactcagattcgtggttgctccagtggcagcaacagatgggggtggccctgtccttccccttgacgctaggtatgcactcacagtcttccctcacgtcccaggaagaacaggagagttcggacaaagactcacagaggcagagagggacagactgcttgctcttctggcagaactccacggaagaacacctcctgaaacaaccccaccagccgatatggaaccaccaggacttcctggtgttagagcagcactcgccgaaagtgaaggaccttggagtggaggaccatttgcagaacccgctagacttcttctcagagaacacgaggccacactgcacgcaagactcgctgaattcgaagccctcgtcgcaagagttaagggtcgtggagcacctcttgtcgttacccacggagaaccacacccaggcaacttgatcctcggagaggaaggctatctcctcgtggactgggatacagttggactggctccagctgaaagggatttgagtctcatctcagacgacccagctgacctcgcaagatacgcagagcttacaggaagaactccagacccagacgcactcgcactctatagactgcgttggagtctccttgatgtggctgagttcgtcgagtggttcagggctgaacaccaaagaacccaagacaccgagagtgcatggaaggggttcactgacacacttgggcaattggctgctggtggatcagctgcatagcctaggaaacttatctctgttatgaatcagaagaagttcatgtctcgtttcatttaaaactttggtggtttgtgttttggggccttgtaaagcccctgatgaataattgttcaactatgtttccgttcctgtgttatacctttctttctaatgagtaatgacatcaaacttcttctgtattgaaattatgtccttgtgagtctctttatcatcgtttcgtctttacattatatgtgctacttttgtctaatgagcctgaaaagtggctccaatggtacgcactggaagatttgttggcttctggtagatatagcgacagtgttgagcttgtaatatcatgtctcttattgctaaattagttcctttcttaacagaaaccttcaaagtttttgtttttgttttcatttacctaatgtacacatacgctggccatgactaacaacatgtccaggcttagagcatatttttttctagcttaaattgttaacttgtcattcagtaaaatccgagaattgtgaagctctaattgaagctaattcgttttataaagtcagttaaaaagtatactaaattatccaacttttcttcaaaatctcaaaattctatgacaaaacgatagtctttgtttatgtcagtaccacaaagaggtggaaaaaaacaccaaaaaaacaataagcaaactatacactgagaagaaaaataaaagagagctcaatagatgttttatactaacggtagattagatcaaagatccaagctttactctacatagagcagaacccagaatcccttcatatctcttttattctagcaccgataatctactgaaaagaagacacttagagctctgtctctttgtcaaagaagtcccagccgtcatccagaagctccttacgttcattaacagaggtaccggcggccgcgggcaactttattatacaaagttgatagattgtatgaattcatttacaattgaatatatcctgccattttacacctcgatatatcctgccacaaattccatgtacacagtacattaaaaacgtccgcaatgtgttattaagttgtctaagcgtcaatttgtttacaccacaatatatcctgcca

SEQ ID NO: 29 - DNA, 9778 bp, Artificial
  Synthetic construct comprising the T-DNA (RB to LB):  RB + UBQ14 TERM::SPCN::CTP::GM-SAMS INTRON1::GM-SAMS 5' UTR::GM-SAMS PRO + UBQ3 TERM::TAGRFP::GM-UBQ INTRON1::GM-UBQ 5' UTR::GM-UBQ PRO-V1 + LB
aattacaacggtatatatcctgtcagccaacaccaaaacatcaaaaaaatcgggatcaggatcaggatctgcggccgcatcctgcaggtttaaacggccggccttcactagctagctgctaagctcaaacgagcaggaagcaacgagagggtggcgcgcgaccgacgtgcgtacgtagcatgagcctgagtggagacgttggacgtgtatgtatatacctctctgcgtgttaactatgtacgtaagcggcaggcagtgcaataagtgtggctctgtagtatgtacgtgcgggtacgatgctgtaagctactgaggcaagtccataaataaataatgacacgtgcgtgttctataatctcttcgcttcttcatttgtccccttgcggagtttggcatccattgatgccgttacgctgagaacagacacagcagacgaaccaaaagtgagttcttgtatgaaactatgacccttcatcgctaggctcaaacagcaccccgtacgaacacagcaaattagtcatctaactattagcccctacatgtttcagacgatacataaatatagcccatccttagcaattagctattggccctgcccatcccaagcaatgatctcgaagtatttttaatatatagtatttttaatatgtagcttttaaaattagaagataattttgagacaaaaatctccaagtatttttttgggtattttttactgcctccgtttttctttatttctcgtcacctagtttaattttgtgctaatcggctataaacgaaacagagagaaaagttactctaaaagcaactccaacagattagatataaatcttatatcctgcctagagctgttaaaaagatagacaactttagtggattagtgtatgcaacaaactctccaaatttaagtatcccaactacccaacgcatatcgttcccttttcattggcgcacgaactttcacctgctatagccgacgtacatgttcgttttttttgggcggcgcttactttcttccccgttcgttctcagcatcgcaactcaatttgttatggcggagaagcccttgtatcccaggtagtaatgcacagatatgcattattattattcataaaatcgagctagttaccctatgaggtgacatgaagcgctcacggttactatgacggttagcttcacgactgttggtggcagtagcgtacgacttagctatagttccggacttacctaactgactagagtcacacttagctgaccctagtcacttaggcgcgccgtcgacggatccgtaccatcaactttgtataataaagttgcccgcggccgccggtacctctgttaatgaacgtaaggagcttctggatgacggctgggacttctttgacaaagagacagagctctaagtgtcttcttttcagtagattatcggtgctagaataaaagagatatgaagggattctgggttctgctctatgtagagtaaagcttggatctttgatctaatctaccgttagtataaaacatctattgagctctcttttatttttcttctcagtgtatagtttgcttattgtttttttggtgtttttttccacctctttgtggtactgacataaacaaagactatcgttttgtcatagaattttgagattttgaagaaaagttggataatttagtatactttttaactgactttataaaacgaattagcttcaattagagcttcacaattctcggattttactgaatgacaagttaacaatttaagctagaaaaaaatatgctctaagcctggacatgttgttagtcatggccagcgtatgtgtacattaggtaaatgaaaacaaaaacaaaaactttgaaggtttctgttaagaaaggaactaatttagcaataagagacatgatattacaagctcaacactgtcgctatatctaccagaagccaacaaatcttccagtgcgtaccattggagccacttttcaggctcattagacaaaagtagcacatataatgtaaagacgaaacgatgataaagagactcacaaggacataatttcaatacagaagaagtttgatgtcattactcattagaaagaaaggtataacacaggaacggaaacatagttgaacaattattcatcaggggctttacaaggccccaaaacacaaaccaccaaagttttaaatgaaacgagacatgaacttcttctgattcataacagagataagtttcctaggctatgcagctgatccaccagcagccaattgcccaagtgtgtcagtgaaccccttccatgcactctcggtgtcttgggttctttggtgttcagccctgaaccactcgacgaactcagccacatcaaggagactccaacgcagtctatagagtgcgagtgcgtctgggtctggagttcttcctgtaagctctgcgtatcttgcgaggtcagctgggtcgtctgagatgagactcaaatccctttcagctggagccagtccaactgtatcccagtccacgaggagatagccttcctctccgaggatcaagttgcctgggtgtggttctccgtgggtaacgacaagaggtgctccacgacccttaactcttgcgacgagggcttcgaattcagcgagtcttgcgtgcagtgtggcctcgtgttctctgagaagaagtctagcgggttctgcaaatggtcctccactccaaggtccttcactttcggcgagtgctgctctaacaccaggaagtcctggtggttccatatcggctggtggggttgtttcaggaggtgttcttccgtggagttctgccagaagagcaagcagtctgtccctctctgcctctgtgagtctttgtccgaactctcctgttcttcctgggacgtgagggaagactgtgagtgcatacctagcgtcaaggggaaggacagggccacccccatctgttgctgccactggagcaaccacgaatctgagtccgtccctatctctaagtgcgagggcagtgtccatagcttgtctgagtcctttaagggctgcttgtgctccctgcccgcaatgctctttgtgttcgaggtcactgacagttgcgaaccaaggtctcccgtcttcatctgtgacggtccagtggtaatctccgaatccgacgggagcgtaagtaaccctacttggactaaccccaaatcccctgagggcctcccagagtcttgtttcatcgaatttctctggcaggttttgcgccgcttgagcctttgcagcacgaacaagtccacgaggttgacgtcctgtctttctgttgaaccttctaagcactctaggtgatctttgtaagttgaaaggagcacttggtctctgggatgaactgaaagcaccaggtaaagcagatgtaagagtagttgcagccatgggttatacttcaaaaactgcacaacaagcctagagttagtacctaaacagtaaatttacaacagagagcaaagacacatgcaaaaatttcagccataaaaaaagttataatagaatttaaagcaaaagtttcattttttaaacatatatacaaacaaactggatttgaaggaagggattaattcccctgctcaaagtttgaattcctattgtgacctatactcgaataaaattgaagcctaaggaatgtatgagaaacaagaaaacaaaacaaaactacagacaaacaagtacaattacaaaattcgctaaaattctgtaatcaccaaaccccatctcagtcagcacaaggcccaaggtttattttgaaataaaaaaaaagtgattttatttctcataagctaaaagaaagaaaggcaattatgaaatgatttcgactagatctgaaagtcaaacgcgtattccgcagatattaaagaaagagtagagtttcacatggatcctagatggacccagttgaggaaaaagcaaggcaaagcaaaccagaagtgcaagatccgaaattgaaccacggaatctaggatttggtagagggagaagaaaagtaccttgagaggtagaagagaagagaagagcagagagatatatgaacgagtgtgtcttggtctcaactctgaagcgatacgagtttagaggggagcattgagttccaatttatagggaaaccgggtggcaggggtgagttaatgacggaaaagcccctaagtaacgagattggattgtgggttagattcaaccgtttgcatccgcggcttagattggggaagtcagagtgaatctcaaccgttgactgagttgaaaattgaatgtagcaaccaattgagccaaccccagcctttgccctttgattttgatttgtttgttgcatactttttatttgtcttctggttctgactctctttctctcgtttcaatgccaggttgcctactcccacaccactcacaagaagattctactgttagtattaaatattttttaatgtattaaatgatgaatgcttttgtaaacagaacaagactatgtctaataagtgtcttgcaacattttttaagaaattaaaaaaaatatatttattatcaaaatcaaatgtatgaaaaatcatgaataatataattttatacatttttttaaaaaatcttttaatttcttaattaatatcttaaaaataatgattaatatttaacccaaaataattagtatgattggtaaggaagatatccatgttatgtttggatgtgagtttgatctagagcccgggccattctggcccactttgtacaagaaagctgggtgcccggggttaaccttcagcttagaaatgatgtgttttctacacttttctcttcttttttttcttttcatctcacatgaatcaaaaagagaaagcttaattacattaaaggttgatgtgatatttactttctaaatatttgctagaagaaattataatgataacattaaattaagttatagtcatttctatttcggttgtctcccactttctgctatgcttttacaacaacagttcaagatttggaatcgttttctttctccaccaatcgtagtaatacttctttttgtgtttgttgaaattttgcaagattctctcttcctctggttaatacacataacttacttggtaagcttggctgcattttcttttcaagcttttaatcaaagactcactagaaattgcaaaggcaaacataaaattatgtgatcaaactcctactgtgagtttttggttacaaacaaaagttaaaaacaaaagcttgatatttaaaagataaactcaacacatatgcatttgactggcgcacagaagacaattcaagacttgggaaaacagtgagccatcaaaatcgtcagataattcagggaatatattgaatgtggagatgtggtaatcacactattgcacacaaagagtggcaaacaagcggcgcccttggtttggtatagtaagagacaattgttttggactgtttgtgttgccatattcacaaaaatactattgagctatgtatgttaaacattatggtcaatgagtagtagtgaacattcaagtttttttttttttccacttcaagtttttcatcttattattatttttcgttgtgatgcagtagtacggcccatcttcaccagtagtatatcaaagccgaaacagatgacaaattgtttaacatgcacttggattattattgagagttgaaatacaaaggcccgttacaagcccaaacgaaggtacataaaagaaaagcagaaaatgaaaacgaaatcgatagggataagtttttccaactgacggaaacacaaactacaccaggtgaaatagatcacctcccaagtgcatgagacacgaaccaaccacttatcatcagatcacaaaagagctcaaagatctagcgatcgcctaattcagtttgtggccaagctttgatggcaagtcgcaatatctagcgacggccacctcgtgctgctccacataagtctccttgtcggcctcttttatgcgctcgagtctatggtccacgtaatacacgccgggcattttcaagtttttggcaggctttttggagcggtaggtggtcttgaagttacagatgagatggcctccgccgacaagcttcaaggccatgtcggatctaccttcaagaccaccgtcggctgggtaaagcatttcagtattggcttcccagccgagagtcttcttctgcatcacgggaccgtttgatgggaagttcacgccgcggatcttgacgttgtagatcaagcagccgtcttgaagactagtgtcttgggtggcggtcaagactcctccgtcttcgtaggtggtcactctctcccaggtgaatccctctgggaatgactgtttgaagaagtctgggatgccctgggtgtggttgatgaaggttctactcccgtacatgaaggaggtggctagtatgtcgaaggcgaatgggagtggacctccttcgaccaccttgattctcatagtctgggttccctcatagggcttgccctcaccctcagaggtacacttgaagtggtgattattcacggtgccctccatgtataacttcatgtgcatgttctctttaatgagctcctcccccttggacaccatggctgtagagtcaacaatcacaagataaatcagaatcaaaatccatcacgtaatttcaagaagcaatttcgtgaaaaaaaatcctaatctatggccacagaatcaacaaataaggtagttgctaaaggacctgagcaatatctcttgaaataccatacagaatcaacgaataaggcttttatcaacggatctgaacaatttcttgaaaaacgactgaagtatcaacaaataaggctgttgtttaacggatctgaagtagttcatgaaaaaaaccttaatctacgactacagaatcaacaattaaggcttgttgtaaacggatctgaaaatctttatgaaaaaaactctaattagacctaatttacggttataaaatcatcaattaaggacgttcttgcattaataaaagctgaatcttctgattatgaaaatttataatcgatgaaacgatagaaaacacaatcaaatcaacatcatgctgatgtagaacaaacaataaagaagaagaaaaaaaaacggaagaaatctacgaaccttgaaaggagaggtagggaactgcgcaaagagaatgaactaatttgattgcaattgaagtgcgattagggtcgaggggtgtgggggcattttatagcatatgcggtggaaccgttctccaatcatattgtgacgcgtgcccatgtatggtgtgacttggtgtttatgacacagatgatatttcggggagtccttcgtagttgacggtttcgtaatcttgacggagtcagagatgtaccttcaccgcttcacgcttggctttatccgttaccacggcgttattaaattgggcccgcacccgttgcaagttaggaccacagtgtccattacctgaacggtcggctgctaccagtattttacattattaaaatctatggaaaagctgtcacgctagatttttttttttttttttatggataagaaaagactaataggaaagctttcttactccactaaagtctttaataattattttttcaattttcaaataaaatcataatcatcccactaaattctttctcatttgtttttcactttgtaagatattcttccgtagatttttataagtaattctttaagatacatagcataataaattgtatacttttagttacagtctatataaaattagtcatttaaaaaatatagccttaatgatttttttaaaatgaagttatttttttctaatttttctttcttatttattatcgaatgattttttctactaatcgtttagggaagagttttatttttctaatgacgagatgtgttaaatgatgcaacttgaaggcgacatattttttaccaataaaataaaactaaaagatagcttgttgacaaaaacaataattgatgttaaagaaaacgtaagggcaatgggtatcatctaattgttggacaagttgtcttctaaggctaggtaagcttttgttttttattagctgaaatatttatttaattgttctataaataaattttttaaaatgatttttaatgtttttaaatattatttaaaataatttttttaaaattttaacattttagtttttaattattttttatcttacttaaattaattataatttattattttctaccattttatactttccaattaattttatcgaagcattaataccatctggtattttgtcactgcttcgtatgattgtttattaaattttagcttctttcacattggagatgctgggcggtgtgagttacagcatggtgtgaagttaaggtggtttgattatggaacccgaaggtgttggtgcaaggtggataaaattgcttgccaggagatacataaaatgatttacaaaatgaaataaagaataaataaatagtcaagttcaaatttaaatcaaggattagaattatttttccgtacatgatgtaaccgcaatcaccccctgctgaatccagatggccattctggccgaatttaagtgactagggtcaccctgctgaatccagatggccattctggccgaatttaagtgactagggtcacgtgaccctagtcacttaccggattctggccgtaccgagctcgaattcggcccaacttttctatacaaagttgaggtacgagatccgcccatccggccggccagatcctgcaggagatccaagcttggcgcgccttaattaataagtgactagggtcacgtgaccctagtcacttatgattccgatgacttcgtaggttcctagctcaagccgctcgtgtccaagcgtcacttacgattagctaatgattacggcatctaggaccgactagttcttatgtgcttctagtctccaaatgtggttgatagttattttgctctaagatcaacagtaatgaagtataaatcatcgttgtggtgtgctactcggttaattgagcattaacacacacaaacatgacgaggatggtataatctccaaaaatgtgtactttgttaggtgggaccctatagccttgattaatgtgctatgttaggcatgcctggaaacgtgtgacgcatatgttttgtgaacctgttgatattatatgtgcttttatattaccatattttattaaaatactaatatttattactagtaagatataacattctatctagcttaaaaactaaccataaatattccataataactagatttaccaaactaatatactaaatatacataataaatacaaaattaacaagacaataatcaatatttatgagcttaatatatttagacattatggttggtcgacgataatcatgctaacttttcgtaattgcttgattgaaatatgcttagaataatgcctctttgttctacatggcaaatagggaccattatggtgtaacaccctgggaaccacaaacaccccgaaatgctactaaactacacaactaaccttcatatataaaatttcgacagcatctcctttgaaaatttgcatagacgtggaagcaacagagtataaacagatctagctagctaagtttaaacggccggccatttacaattgaatatatcctgccattttacacctcgatatatcctgccacaaattccatgtacacagtacattaaaaacgtccgcaatgtgttattaagttgtctaagcgtcaatttgtttacaccacaatatatcctgcca

SEQ ID NO: 30 - DNA, 9780 bp, Artificial
  Synthetic construct comprising the T-DNA (RB to LB):  RB + UBQ14 TERM::APH::CTP::GM-SAMS INTRON1::GM-SAMS 5' UTR::GM-SAMS PRO + UBQ3 TERM::TAGRFP::GM-UBQ INTRON1::GM-UBQ 5' UTR::GM-UBQ PRO-V1 + LB
aattacaacggtatatatcctgtcagccaacaccaaaacatcaaaaaaatcgggatcaggatcaggatctgcggccgcatcctgcaggtttaaacggccggccttcactagctagctgctaagctcaaacgagcaggaagcaacgagagggtggcgcgcgaccgacgtgcgtacgtagcatgagcctgagtggagacgttggacgtgtatgtatatacctctctgcgtgttaactatgtacgtaagcggcaggcagtgcaataagtgtggctctgtagtatgtacgtgcgggtacgatgctgtaagctactgaggcaagtccataaataaataatgacacgtgcgtgttctataatctcttcgcttcttcatttgtccccttgcggagtttggcatccattgatgccgttacgctgagaacagacacagcagacgaaccaaaagtgagttcttgtatgaaactatgacccttcatcgctaggctcaaacagcaccccgtacgaacacagcaaattagtcatctaactattagcccctacatgtttcagacgatacataaatatagcccatccttagcaattagctattggccctgcccatcccaagcaatgatctcgaagtatttttaatatatagtatttttaatatgtagcttttaaaattagaagataattttgagacaaaaatctccaagtatttttttgggtattttttactgcctccgtttttctttatttctcgtcacctagtttaattttgtgctaatcggctataaacgaaacagagagaaaagttactctaaaagcaactccaacagattagatataaatcttatatcctgcctagagctgttaaaaagatagacaactttagtggattagtgtatgcaacaaactctccaaatttaagtatcccaactacccaacgcatatcgttcccttttcattggcgcacgaactttcacctgctatagccgacgtacatgttcgttttttttgggcggcgcttactttcttccccgttcgttctcagcatcgcaactcaatttgttatggcggagaagcccttgtatcccaggtagtaatgcacagatatgcattattattattcataaaatcgagctagttaccctatgaggtgacatgaagcgctcacggttactatgacggttagcttcacgactgttggtggcagtagcgtacgacttagctatagttccggacttacctaactgactagagtcacacttagctgaccctagtcacttaggcgcgccgtcgacggatccgtaccatcaactttgtataataaagttgcccgcggccgccggtacctctgttaatgaacgtaaggagcttctggatgacggctgggacttctttgacaaagagacagagctctaagtgtcttcttttcagtagattatcggtgctagaataaaagagatatgaagggattctgggttctgctctatgtagagtaaagcttggatctttgatctaatctaccgttagtataaaacatctattgagctctcttttatttttcttctcagtgtatagtttgcttattgtttttttggtgtttttttccacctctttgtggtactgacataaacaaagactatcgttttgtcatagaattttgagattttgaagaaaagttggataatttagtatactttttaactgactttataaaacgaattagcttcaattagagcttcacaattctcggattttactgaatgacaagttaacaatttaagctagaaaaaaatatgctctaagcctggacatgttgttagtcatggccagcgtatgtgtacattaggtaaatgaaaacaaaaacaaaaactttgaaggtttctgttaagaaaggaactaatttagcaataagagacatgatattacaagctcaacactgtcgctatatctaccagaagccaacaaatcttccagtgcgtaccattggagccacttttcaggctcattagacaaaagtagcacatataatgtaaagacgaaacgatgataaagagactcacaaggacataatttcaatacagaagaagtttgatgtcattactcattagaaagaaaggtataacacaggaacggaaacatagttgaacaattattcatcaggggctttacaaggccccaaaacacaaaccaccaaagttttaaatgaaacgagacatgaacttcttctgattcataacagagataagtttcctaggctactgctcagtagcgaaagcgatctcgacgacgttgttggggtcgaacatctccttgaagtacttgaaggactcgagcctggactggttgttttgatttctggagagcaagtcctgtccgtagacagcgatgtcctcgacgattctctcgtgtctgtagtaggagaggattgttttatcgacatttatttctccgtatccctcgtagaagtactggatttcatgaggtttattccagacgttgccgacgccgcctccgatgaacatgaggtctctctccttaggagccaacataggctcgtcccagtcaataatgtagatggactcctcgtttccgaccaagacgtttccagcatgtatgtcggagtggcacaagacgtacttgtccaagtcgggctgaatcttcttggagagcttctcggaagtgtcgactagtctgtggatagcggcactattttggttgaagaaagacttgaaagcggcggtgagcttgtcgtcggagttgtcgaactcgatttgattgtagaaggacctgacgatctctctccacttgggggagtagatctcctttcttaattgctgctggatggagatggggacggatgtttcatggatctgtctgaggacctttccgagctgcttccactgctttccagtgaggttctgagtgaatccgttgggagcgtgaatgaaggggtaggcaattattttgaaatgcttgagctgctggaacaacttagcctcgagggtgtggatggggaagatgatctcttttattccggagtcgtggaggagtctgatgatggagagattaatttcatcgtggtagccgtattttagctttatgaagtaagacttagactcagagtcggcctggtaagcgaaagcgttagtgtcggctcctccctgaatgaactgagcggtgtggatgtcgattccgtagtggaccttcaagagctcgatgagctgctgagcctgaattggttgcttcaacgccgcttgagcctttgcagcacgaacaagtccacgaggttgacgtcctgtctttctgttgaaccttctaagcactctaggtgatctttgtaagttgaaaggagcacttggtctctgggatgaactgaaagcaccaggtaaagcagatgtaagagtagttgcagccatggctgttaatcagaaaaactcagattaatcgacaaattcgatcgcacaaactagaaactaacaccagatctagatagaaatcacaaatcgaagagtaattattcgacaaaactcaaattatttgaacaaatcggatgatatctatgaaaccctaatcgagaattaagatgatatctaacgatcaaacccagaaaatcgtcttcgatctaagattaacagaatctaaaccaaagaacatatacgaaattgggatcgaacgaaaacaaaatcgaagattttgagagaataaggaacacagaaatttaccttgatcacggtagagagaattgagagaaagtttttaagattttgagaaattgaaatctgaattgtgaagaagaagagctctttgggtattgttttatagaagaagaagaagaaaagacgaggacgactaggtcacgagaaagctaaggcggtgaagcaatagctaataataaaatgacacgtgtattgagcgttgtttacacgcaaagttgtttttggctaattgccttatttttaggttgaggaaaagtatttgtgctttgagttgataaacacgactcgtgtgtgccggctgcaaccactttgacgccgtttattactgactcgtcgacaaccacaatttctaacggtcgtcataagatccagccgttgagatttaacgatcgttacgatttatatttttttagcattatcgttttattttttaaatatacggtggagctgaaaattggcaataattgaaccgtgggtcccactgcattgaagcgtatttcgtattttctagaattcttcgtgctttatttcttttcctttttgtttttttttgccatttatctaatgcaagtgggcttataaaatcagtgaatttcttggaaaagtaacttctttatcgtataacatattgtgaaattatccatttcttttaattttttagtgttattggatatttttgtatgattattgatttgcataggataatgacttttgtatcaagttggtgaacaagtctcgttaaaaaaggcaagtggtttggtgactcgatttattcttgttatttaattcatatatcaatggatcttatttggggcctggtccatatttaacactcgtgttcagtccaatgaccaataatattttttcattaataacaatgtaacaagaatgatacacaaaacattctttgaataagttcgctatgaagaagggaacttatccggtcctagatcatcagttcatacaaacctccatagagttcaacatcttaaacaagaatatcctgatgcggccgcggccagatccgttaacggccactttgtacaagaaagctgggtgcccggggttaaccttcagcttagaaatgatgtgttttctacacttttctcttcttttttttcttttcatctcacatgaatcaaaaagagaaagcttaattacattaaaggttgatgtgatatttactttctaaatatttgctagaagaaattataatgataacattaaattaagttatagtcatttctatttcggttgtctcccactttctgctatgcttttacaacaacagttcaagatttggaatcgttttctttctccaccaatcgtagtaatacttctttttgtgtttgttgaaattttgcaagattctctcttcctctggttaatacacataacttacttggtaagcttggctgcattttcttttcaagcttttaatcaaagactcactagaaattgcaaaggcaaacataaaattatgtgatcaaactcctactgtgagtttttggttacaaacaaaagttaaaaacaaaagcttgatatttaaaagataaactcaacacatatgcatttgactggcgcacagaagacaattcaagacttgggaaaacagtgagccatcaaaatcgtcagataattcagggaatatattgaatgtggagatgtggtaatcacactattgcacacaaagagtggcaaacaagcggcgcccttggtttggtatagtaagagacaattgttttggactgtttgtgttgccatattcacaaaaatactattgagctatgtatgttaaacattatggtcaatgagtagtagtgaacattcaagtttttttttttttccacttcaagtttttcatcttattattatttttcgttgtgatgcagtagtacggcccatcttcaccagtagtatatcaaagccgaaacagatgacaaattgtttaacatgcacttggattattattgagagttgaaatacaaaggcccgttacaagcccaaacgaaggtacataaaagaaaagcagaaaatgaaaacgaaatcgatagggataagtttttccaactgacggaaacacaaactacaccaggtgaaatagatcacctcccaagtgcatgagacacgaaccaaccacttatcatcagatcacaaaagagctcaaagatctagcgatcgcctaattcagtttgtggccaagctttgatggcaagtcgcaatatctagcgacggccacctcgtgctgctccacataagtctccttgtcggcctcttttatgcgctcgagtctatggtccacgtaatacacgccgggcattttcaagtttttggcaggctttttggagcggtaggtggtcttgaagttacagatgagatggcctccgccgacaagcttcaaggccatgtcggatctaccttcaagaccaccgtcggctgggtaaagcatttcagtattggcttcccagccgagagtcttcttctgcatcacgggaccgtttgatgggaagttcacgccgcggatcttgacgttgtagatcaagcagccgtcttgaagactagtgtcttgggtggcggtcaagactcctccgtcttcgtaggtggtcactctctcccaggtgaatccctctgggaatgactgtttgaagaagtctgggatgccctgggtgtggttgatgaaggttctactcccgtacatgaaggaggtggctagtatgtcgaaggcgaatgggagtggacctccttcgaccaccttgattctcatagtctgggttccctcatagggcttgccctcaccctcagaggtacacttgaagtggtgattattcacggtgccctccatgtataacttcatgtgcatgttctctttaatgagctcctcccccttggacaccatggctgtagagtcaacaatcacaagataaatcagaatcaaaatccatcacgtaatttcaagaagcaatttcgtgaaaaaaaatcctaatctatggccacagaatcaacaaataaggtagttgctaaaggacctgagcaatatctcttgaaataccatacagaatcaacgaataaggcttttatcaacggatctgaacaatttcttgaaaaacgactgaagtatcaacaaataaggctgttgtttaacggatctgaagtagttcatgaaaaaaaccttaatctacgactacagaatcaacaattaaggcttgttgtaaacggatctgaaaatctttatgaaaaaaactctaattagacctaatttacggttataaaatcatcaattaaggacgttcttgcattaataaaagctgaatcttctgattatgaaaatttataatcgatgaaacgatagaaaacacaatcaaatcaacatcatgctgatgtagaacaaacaataaagaagaagaaaaaaaaacggaagaaatctacgaaccttgaaaggagaggtagggaactgcgcaaagagaatgaactaatttgattgcaattgaagtgcgattagggtcgaggggtgtgggggcattttatagcatatgcggtggaaccgttctccaatcatattgtgacgcgtgcccatgtatggtgtgacttggtgtttatgacacagatgatatttcggggagtccttcgtagttgacggtttcgtaatcttgacggagtcagagatgtaccttcaccgcttcacgcttggctttatccgttaccacggcgttattaaattgggcccgcacccgttgcaagttaggaccacagtgtccattacctgaacggtcggctgctaccagtattttacattattaaaatctatggaaaagctgtcacgctagatttttttttttttttttatggataagaaaagactaataggaaagctttcttactccactaaagtctttaataattattttttcaattttcaaataaaatcataatcatcccactaaattctttctcatttgtttttcactttgtaagatattcttccgtagatttttataagtaattctttaagatacatagcataataaattgtatacttttagttacagtctatataaaattagtcatttaaaaaatatagccttaatgatttttttaaaatgaagttatttttttctaatttttctttcttatttattatcgaatgattttttctactaatcgtttagggaagagttttatttttctaatgacgagatgtgttaaatgatgcaacttgaaggcgacatattttttaccaataaaataaaactaaaagatagcttgttgacaaaaacaataattgatgttaaagaaaacgtaagggcaatgggtatcatctaattgttggacaagttgtcttctaaggctaggtaagcttttgttttttattagctgaaatatttatttaattgttctataaataaattttttaaaatgatttttaatgtttttaaatattatttaaaataatttttttaaaattttaacattttagtttttaattattttttatcttacttaaattaattataatttattattttctaccattttatactttccaattaattttatcgaagcattaataccatctggtattttgtcactgcttcgtatgattgtttattaaattttagcttctttcacattggagatgctgggcggtgtgagttacagcatggtgtgaagttaaggtggtttgattatggaacccgaaggtgttggtgcaaggtggataaaattgcttgccaggagatacataaaatgatttacaaaatgaaataaagaataaataaatagtcaagttcaaatttaaatcaaggattagaattatttttccgtacatgatgtaaccgcaatcaccccctgctgaatccagatggccattctggccgaatttaagtgactagggtcaccctgctgaatccagatggccattctggccgaatttaagtgactagggtcacgtgaccctagtcacttaccggattctggccgtaccgagctcgaattcggcccaacttttctatacaaagttgaggtacgagatccgcccatccggccggccagatcctgcaggagatccaagcttggcgcgccttaattaataagtgactagggtcacgtgaccctagtcacttatgattccgatgacttcgtaggttcctagctcaagccgctcgtgtccaagcgtcacttacgattagctaatgattacggcatctaggaccgactagttcttatgtgcttctagtctccaaatgtggttgatagttattttgctctaagatcaacagtaatgaagtataaatcatcgttgtggtgtgctactcggttaattgagcattaacacacacaaacatgacgaggatggtataatctccaaaaatgtgtactttgttaggtgggaccctatagccttgattaatgtgctatgttaggcatgcctggaaacgtgtgacgcatatgttttgtgaacctgttgatattatatgtgcttttatattaccatattttattaaaatactaatatttattactagtaagatataacattctatctagcttaaaaactaaccataaatattccataataactagatttaccaaactaatatactaaatatacataataaatacaaaattaacaagacaataatcaatatttatgagcttaatatatttagacattatggttggtcgacgataatcatgctaacttttcgtaattgcttgattgaaatatgcttagaataatgcctctttgttctacatggcaaatagggaccattatggtgtaacaccctgggaaccacaaacaccccgaaatgctactaaactacacaactaaccttcatatataaaatttcgacagcatctcctttgaaaatttgcatagacgtggaagcaacagagtataaacagatctagctagctaagtttaaacggccggccatttacaattgaatatatcctgccattttacacctcgatatatcctgccacaaattccatgtacacagtacattaaaaacgtccgcaatgtgttattaagttgtctaagcgtcaatttgtttacaccacaatatatcctgcca

SEQ ID NO: 31 - DNA, 9775 bp, Artificial
  Synthetic construct comprising the T-DNA (RB to LB):  RB + UBQ14 TERM::APH::CTP:: AT-UBIQ10 INTRON1:: AT-UBIQ10 5' UTR:: AT-UBIQ10 PRO + UBQ3 TERM::TAGRFP::GM-UBQ INTRON1::GM-UBQ 5' UTR::GM-UBQ PRO-V1 + LB
aattacaacggtatatatcctgtcagccaacaccaaaacatcaaaaaaatcgggatcaggatcaggatctgcggccgcatcctgcaggtttaaacggccggccttcactagctagctgctaagctcaaacgagcaggaagcaacgagagggtggcgcgcgaccgacgtgcgtacgtagcatgagcctgagtggagacgttggacgtgtatgtatatacctctctgcgtgttaactatgtacgtaagcggcaggcagtgcaataagtgtggctctgtagtatgtacgtgcgggtacgatgctgtaagctactgaggcaagtccataaataaataatgacacgtgcgtgttctataatctcttcgcttcttcatttgtccccttgcggagtttggcatccattgatgccgttacgctgagaacagacacagcagacgaaccaaaagtgagttcttgtatgaaactatgacccttcatcgctaggctcaaacagcaccccgtacgaacacagcaaattagtcatctaactattagcccctacatgtttcagacgatacataaatatagcccatccttagcaattagctattggccctgcccatcccaagcaatgatctcgaagtatttttaatatatagtatttttaatatgtagcttttaaaattagaagataattttgagacaaaaatctccaagtatttttttgggtattttttactgcctccgtttttctttatttctcgtcacctagtttaattttgtgctaatcggctataaacgaaacagagagaaaagttactctaaaagcaactccaacagattagatataaatcttatatcctgcctagagctgttaaaaagatagacaactttagtggattagtgtatgcaacaaactctccaaatttaagtatcccaactacccaacgcatatcgttcccttttcattggcgcacgaactttcacctgctatagccgacgtacatgttcgttttttttgggcggcgcttactttcttccccgttcgttctcagcatcgcaactcaatttgttatggcggagaagcccttgtatcccaggtagtaatgcacagatatgcattattattattcataaaatcgagctagttaccctatgaggtgacatgaagcgctcacggttactatgacggttagcttcacgactgttggtggcagtagcgtacgacttagctatagttccggacttacctaactgactagagtcacacttagctgaccctagtcacttaggcgcgccgtcgacggatccgtaccatcaactttgtataataaagttgcccgcggccgccggtacctctgttaatgaacgtaaggagcttctggatgacggctgggacttctttgacaaagagacagagctctaagtgtcttcttttcagtagattatcggtgctagaataaaagagatatgaagggattctgggttctgctctatgtagagtaaagcttggatctttgatctaatctaccgttagtataaaacatctattgagctctcttttatttttcttctcagtgtatagtttgcttattgtttttttggtgtttttttccacctctttgtggtactgacataaacaaagactatcgttttgtcatagaattttgagattttgaagaaaagttggataatttagtatactttttaactgactttataaaacgaattagcttcaattagagcttcacaattctcggattttactgaatgacaagttaacaatttaagctagaaaaaaatatgctctaagcctggacatgttgttagtcatggccagcgtatgtgtacattaggtaaatgaaaacaaaaacaaaaactttgaaggtttctgttaagaaaggaactaatttagcaataagagacatgatattacaagctcaacactgtcgctatatctaccagaagccaacaaatcttccagtgcgtaccattggagccacttttcaggctcattagacaaaagtagcacatataatgtaaagacgaaacgatgataaagagactcacaaggacataatttcaatacagaagaagtttgatgtcattactcattagaaagaaaggtataacacaggaacggaaacatagttgaacaattattcatcaggggctttacaaggccccaaaacacaaaccaccaaagttttaaatgaaacgagacatgaacttcttctgattcataacagagataagtttcctaggctactgctcagtagcgaaagcgatctcgacgacgttgttggggtcgaacatctccttgaagtacttgaaggactcgagcctggactggttgttttgatttctggagagcaagtcctgtccgtagacagcgatgtcctcgacgattctctcgtgtctgtagtaggagaggattgttttatcgacatttatttctccgtatccctcgtagaagtactggatttcatgaggtttattccagacgttgccgacgccgcctccgatgaacatgaggtctctctccttaggagccaacataggctcgtcccagtcaataatgtagatggactcctcgtttccgaccaagacgtttccagcatgtatgtcggagtggcacaagacgtacttgtccaagtcgggctgaatcttcttggagagcttctcggaagtgtcgactagtctgtggatagcggcactattttggttgaagaaagacttgaaagcggcggtgagcttgtcgtcggagttgtcgaactcgatttgattgtagaaggacctgacgatctctctccacttgggggagtagatctcctttcttaattgctgctggatggagatggggacggatgtttcatggatctgtctgaggacctttccgagctgcttccactgctttccagtgaggttctgagtgaatccgttgggagcgtgaatgaaggggtaggcaattattttgaaatgcttgagctgctggaacaacttagcctcgagggtgtggatggggaagatgatctcttttattccggagtcgtggaggagtctgatgatggagagattaatttcatcgtggtagccgtattttagctttatgaagtaagacttagactcagagtcggcctggtaagcgaaagcgttagtgtcggctcctccctgaatgaactgagcggtgtggatgtcgattccgtagtggaccttcaagagctcgatgagctgctgagcctgaattggttgcttcaacgccgcttgagcctttgcagcacgaacaagtccacgaggttgacgtcctgtctttctgttgaaccttctaagcactctaggtgatctttgtaagttgaaaggagcacttggtctctgggatgaactgaaagcaccaggtaaagcagatgtaagagtagttgcagccatgggttatacttcaaaaactgcacaacaagcctagagttagtacctaaacagtaaatttacaacagagagcaaagacacatgcaaaaatttcagccataaaaaaagttataatagaatttaaagcaaaagtttcattttttaaacatatatacaaacaaactggatttgaaggaagggattaattcccctgctcaaagtttgaattcctattgtgacctatactcgaataaaattgaagcctaaggaatgtatgagaaacaagaaaacaaaacaaaactacagacaaacaagtacaattacaaaattcgctaaaattctgtaatcaccaaaccccatctcagtcagcacaaggcccaaggtttattttgaaataaaaaaaaagtgattttatttctcataagctaaaagaaagaaaggcaattatgaaatgatttcgactagatctgaaagtcaaacgcgtattccgcagatattaaagaaagagtagagtttcacatggatcctagatggacccagttgaggaaaaagcaaggcaaagcaaaccagaagtgcaagatccgaaattgaaccacggaatctaggatttggtagagggagaagaaaagtaccttgagaggtagaagagaagagaagagcagagagatatatgaacgagtgtgtcttggtctcaactctgaagcgatacgagtttagaggggagcattgagttccaatttatagggaaaccgggtggcaggggtgagttaatgacggaaaagcccctaagtaacgagattggattgtgggttagattcaaccgtttgcatccgcggcttagattggggaagtcagagtgaatctcaaccgttgactgagttgaaaattgaatgtagcaaccaattgagccaaccccagcctttgccctttgattttgatttgtttgttgcatactttttatttgtcttctggttctgactctctttctctcgtttcaatgccaggttgcctactcccacaccactcacaagaagattctactgttagtattaaatattttttaatgtattaaatgatgaatgcttttgtaaacagaacaagactatgtctaataagtgtcttgcaacattttttaagaaattaaaaaaaatatatttattatcaaaatcaaatgtatgaaaaatcatgaataatataattttatacatttttttaaaaaatcttttaatttcttaattaatatcttaaaaataatgattaatatttaacccaaaataattagtatgattggtaaggaagatatccatgttatgtttggatgtgagtttgatctagagcccgggccattctggcccactttgtacaagaaagctgggtgcccggggttaaccttcagcttagaaatgatgtgttttctacacttttctcttcttttttttcttttcatctcacatgaatcaaaaagagaaagcttaattacattaaaggttgatgtgatatttactttctaaatatttgctagaagaaattataatgataacattaaattaagttatagtcatttctatttcggttgtctcccactttctgctatgcttttacaacaacagttcaagatttggaatcgttttctttctccaccaatcgtagtaatacttctttttgtgtttgttgaaattttgcaagattctctcttcctctggttaatacacataacttacttggtaagcttggctgcattttcttttcaagcttttaatcaaagactcactagaaattgcaaaggcaaacataaaattatgtgatcaaactcctactgtgagtttttggttacaaacaaaagttaaaaacaaaagcttgatatttaaaagataaactcaacacatatgcatttgactggcgcacagaagacaattcaagacttgggaaaacagtgagccatcaaaatcgtcagataattcagggaatatattgaatgtggagatgtggtaatcacactattgcacacaaagagtggcaaacaagcggcgcccttggtttggtatagtaagagacaattgttttggactgtttgtgttgccatattcacaaaaatactattgagctatgtatgttaaacattatggtcaatgagtagtagtgaacattcaagtttttttttttttccacttcaagtttttcatcttattattatttttcgttgtgatgcagtagtacggcccatcttcaccagtagtatatcaaagccgaaacagatgacaaattgtttaacatgcacttggattattattgagagttgaaatacaaaggcccgttacaagcccaaacgaaggtacataaaagaaaagcagaaaatgaaaacgaaatcgatagggataagtttttccaactgacggaaacacaaactacaccaggtgaaatagatcacctcccaagtgcatgagacacgaaccaaccacttatcatcagatcacaaaagagctcaaagatctagcgatcgcctaattcagtttgtggccaagctttgatggcaagtcgcaatatctagcgacggccacctcgtgctgctccacataagtctccttgtcggcctcttttatgcgctcgagtctatggtccacgtaatacacgccgggcattttcaagtttttggcaggctttttggagcggtaggtggtcttgaagttacagatgagatggcctccgccgacaagcttcaaggccatgtcggatctaccttcaagaccaccgtcggctgggtaaagcatttcagtattggcttcccagccgagagtcttcttctgcatcacgggaccgtttgatgggaagttcacgccgcggatcttgacgttgtagatcaagcagccgtcttgaagactagtgtcttgggtggcggtcaagactcctccgtcttcgtaggtggtcactctctcccaggtgaatccctctgggaatgactgtttgaagaagtctgggatgccctgggtgtggttgatgaaggttctactcccgtacatgaaggaggtggctagtatgtcgaaggcgaatgggagtggacctccttcgaccaccttgattctcatagtctgggttccctcatagggcttgccctcaccctcagaggtacacttgaagtggtgattattcacggtgccctccatgtataacttcatgtgcatgttctctttaatgagctcctcccccttggacaccatggctgtagagtcaacaatcacaagataaatcagaatcaaaatccatcacgtaatttcaagaagcaatttcgtgaaaaaaaatcctaatctatggccacagaatcaacaaataaggtagttgctaaaggacctgagcaatatctcttgaaataccatacagaatcaacgaataaggcttttatcaacggatctgaacaatttcttgaaaaacgactgaagtatcaacaaataaggctgttgtttaacggatctgaagtagttcatgaaaaaaaccttaatctacgactacagaatcaacaattaaggcttgttgtaaacggatctgaaaatctttatgaaaaaaactctaattagacctaatttacggttataaaatcatcaattaaggacgttcttgcattaataaaagctgaatcttctgattatgaaaatttataatcgatgaaacgatagaaaacacaatcaaatcaacatcatgctgatgtagaacaaacaataaagaagaagaaaaaaaaacggaagaaatctacgaaccttgaaaggagaggtagggaactgcgcaaagagaatgaactaatttgattgcaattgaagtgcgattagggtcgaggggtgtgggggcattttatagcatatgcggtggaaccgttctccaatcatattgtgacgcgtgcccatgtatggtgtgacttggtgtttatgacacagatgatatttcggggagtccttcgtagttgacggtttcgtaatcttgacggagtcagagatgtaccttcaccgcttcacgcttggctttatccgttaccacggcgttattaaattgggcccgcacccgttgcaagttaggaccacagtgtccattacctgaacggtcggctgctaccagtattttacattattaaaatctatggaaaagctgtcacgctagatttttttttttttttttatggataagaaaagactaataggaaagctttcttactccactaaagtctttaataattattttttcaattttcaaataaaatcataatcatcccactaaattctttctcatttgtttttcactttgtaagatattcttccgtagatttttataagtaattctttaagatacatagcataataaattgtatacttttagttacagtctatataaaattagtcatttaaaaaatatagccttaatgatttttttaaaatgaagttatttttttctaatttttctttcttatttattatcgaatgattttttctactaatcgtttagggaagagttttatttttctaatgacgagatgtgttaaatgatgcaacttgaaggcgacatattttttaccaataaaataaaactaaaagatagcttgttgacaaaaacaataattgatgttaaagaaaacgtaagggcaatgggtatcatctaattgttggacaagttgtcttctaaggctaggtaagcttttgttttttattagctgaaatatttatttaattgttctataaataaattttttaaaatgatttttaatgtttttaaatattatttaaaataatttttttaaaattttaacattttagtttttaattattttttatcttacttaaattaattataatttattattttctaccattttatactttccaattaattttatcgaagcattaataccatctggtattttgtcactgcttcgtatgattgtttattaaattttagcttctttcacattggagatgctgggcggtgtgagttacagcatggtgtgaagttaaggtggtttgattatggaacccgaaggtgttggtgcaaggtggataaaattgcttgccaggagatacataaaatgatttacaaaatgaaataaagaataaataaatagtcaagttcaaatttaaatcaaggattagaattatttttccgtacatgatgtaaccgcaatcaccccctgctgaatccagatggccattctggccgaatttaagtgactagggtcaccctgctgaatccagatggccattctggccgaatttaagtgactagggtcacgtgaccctagtcacttaccggattctggccgtaccgagctcgaattcggcccaacttttctatacaaagttgaggtacgagatccgcccatccggccggccagatcctgcaggagatccaagcttggcgcgccttaattaataagtgactagggtcacgtgaccctagtcacttatgattccgatgacttcgtaggttcctagctcaagccgctcgtgtccaagcgtcacttacgattagctaatgattacggcatctaggaccgactagttcttatgtgcttctagtctccaaatgtggttgatagttattttgctctaagatcaacagtaatgaagtataaatcatcgttgtggtgtgctactcggttaattgagcattaacacacacaaacatgacgaggatggtataatctccaaaaatgtgtactttgttaggtgggaccctatagccttgattaatgtgctatgttaggcatgcctggaaacgtgtgacgcatatgttttgtgaacctgttgatattatatgtgcttttatattaccatattttattaaaatactaatatttattactagtaagatataacattctatctagcttaaaaactaaccataaatattccataataactagatttaccaaactaatatactaaatatacataataaatacaaaattaacaagacaataatcaatatttatgagcttaatatatttagacattatggttggtcgacgataatcatgctaacttttcgtaattgcttgattgaaatatgcttagaataatgcctctttgttctacatggcaaatagggaccattatggtgtaacaccctgggaaccacaaacaccccgaaatgctactaaactacacaactaaccttcatatataaaatttcgacagcatctcctttgaaaatttgcatagacgtggaagcaacagagtataaacagatctagctagctaagtttaaacggccggccatttacaattgaatatatcctgccattttacacctcgatatatcctgccacaaattccatgtacacagtacattaaaaacgtccgcaatgtgttattaagttgtctaagcgtcaatttgtttacaccacaatatatcctgcca

SEQ ID NO: 32 - DNA, 28280 bp, Artificial Sequence
  Synthetic construct comprising the T-DNA (RB to LB):  RB + LOXP + PLTP:WUS:IN2-1 TERM + ZMHSP17.7:MO-CRE:PINII TERM + UBI1ZMPRO:NPTII:SB-UBI TERM + UBI1ZM PRO-FRT1 FRT1:CTP::SPCN::SB-UBI TERM + LB)
ggatctttttggaatgctgctccgtcgtcaggctttccgacgtttgggtggttgaacagaagtcattatcgcacggaatgccaagcactcccgaggggaaccctgtggttggcatgcacatacaaatggacgaacggataaaccttttcacgcccttttaaatatccgattattctaataaacgctcttttctcttaggtttacccgccaatatatcctgtcaaacactgcggccgcacttgaccgcggatggagccggagctgtggtgaggccatcgacgggaggtgggggagaacacagtctcagtgttctttgtgagtccgcaaggtttttagcttttctgtattaattaaggttgctgttggctgtagaatacggtcgtggaagagctgtatcggtagctactacgtaagctattatatactggaagtctggagctcgtcgatctccggtcgtcttcctccatttctcctcgtcttgctttgactgctgctaccatttgcttctgttttctgatgaagcatgccatgtcggccaccagtgtttgtgtggtttttgcagggaatggctttcaagtgctgtgattgaatggccctcgtcgtcctcggctgagctcacatggacgcgtcatgtgagtgagatatatgatcatatgatgagtggggttcgggtgagtgcgtacttgaagtaggatcccgctttcactcattcattcattggcctttaaaccgggaaattttcgcgaggagatggagggaagcaagcagggtgacgagtgcagagtgccgcgagcgctttgtcaaaaggcaccgccgtaggcaaaaaaatcaatggccctgactgactcgatggtagtactactgtagagactagagagggttgctccccatatcttcgtgtgacttttactccagcattgcatttccgtcattgagacgttaattaatagcagctttcgggacagatgactgtggccatgtttcgtcacggccgcttcgtgccagctgggggtactatagtactgtgattttgttagtaaaaactttcattaggccaccattgacgaccgggccttcgcttttgctgcgctaattaaccatttcccggcgaccgaagggaacatgaacatgccccgacacatgagggcatgaggactagtgttctccctgtcgttcgttgacttgactagtgatagtttaaacgctcttcaactggaagagcggttactaccggttcactagctagctgctaatcgagctagttaccctatgaggtgacatgaagcgctcacggttactatgacggttagcttcacgactgttggtggcagtagcgtacgacttagctatagttccggacttacctagctaataacttcgtatagcatacattatacgaagttatggttaccgcggccgcgaattccggaccgggttaccgaattcttaccctagctccctgcggctgttacgcggtcccccatcaatcttctgttcttgcggttgtagcctgtgtaacagtgctagagtatgtatgataaataggttttaagtctgcttacatgacattttttattgtggaagagacatataaaaattagagagagtggttctcatgcaacggcggacggcccggtgctaaaagagcttcaagacaaaataatgaaacaggaagagagtagatttatctaagagccaactttattatatgaatgtgtttattgttggctttagatgatatggtaaggagttagagctaataatagataggctctattattattattattaattaaactcgctctaaggaggaaagtgggaggaagggacgaggacgaagactactggaagcatcgtgcatggatgatggatgtggtgtctcttaatgtaggtggccggaggatgtacgtgttaattgcgcgataagcactcagatccaaccgcaaactacctccacactgacacactgatagagagaaagagagacctccgacgactgccgccgcagatgagccacgtacgtatacgacgtctgccggccggctcaggctgccgccatcaccctgctcgaaagtcgcgttaggcggcgccagctacataggagtatctagtctagccagttagtatactactactgcgctgatgatgaattaactctgcatagatactgtacttgcctccctccaacacccaaccacctcctgctcggctcttaataacttggacacggatcgatgccatccaaggaagaacacgacgacgacgacggaacatccaccatgcaagcttgcatccatacgccgatacgcgtgcatccatccatccaccattatttccattttccaccgatcacacgtacacaggcctatttaaggagcgacatcccactgcaactctcctcaccactcatcaccagctagctctagcaaagcacttgccatctaccgaccgccgcattccaaacagcccgacgagctagcagagcggcaggcacctccctcctcaaggaacccatggcggccaatgcgggcggcggtggagcgggaggaggcagcggcagcggcagcgtggctgcgccggcggtgtgccgccccagcggctcgcggtggacgccgacgccggagcagatcaggatgctgaaggagctctactacggctgcggcatccggtcgcccagctcggagcagatccagcgcatcaccgccatgctgcggcagcacggcaagatcgagggcaagaacgtcttctactggttccagaaccacaaggcccgcgagcgccagaagcgccgcctcaccagcctcgacgtcaacgtgcccgccgccggcgcggccgacgccaccaccagccaactcggcgtcctctcgctgtcgtcgccgccgccttcaggcgcggcgcctccctcgcccaccctcggcttctacgccgccggcaatggcggcggatcggctgtgctgctggacacgagttccgactggggcagcagcggcgctgctatggccaccgagacatgcttcctgcaggactacatgggcgtgacggacacgggcagctcgtcgcagtggccacgcttctcgtcgtcggacacgataatggcggcggccgcggcgcgggcggcgacgacgcgggcgcccgagacgctccctctcttcccgacctgcggcgacgacggcggcagcggtagcagcagctacttgccgttctggggtgccgcgtccacaactgccggcgccacttcttccgttgcgatccaacagcaacaccagctgcaggagcagtacagcttttacagcaacagcaacagcacccagctggccggcaccggcaaccaagacgtatcggcaacagcagcagcagccgccgccctggagctgagcctcagctcatggtgctccccttaccctgctgcagggagtatgtgagagcaacgcgagctgccactgctcttcactgatgtctctggaatggaaggaggaggaagtgagaacagatcattcgacaaagcagcattagtccgttgatcggtggaagaccactcgtcagtgttgagttgaatgtttgatcaataaaatacggcaatgctgtaagggttgttttttatgccattgataatacactgtactgttcagttgttgaactctatttcttagccatgccaagtgcttttcttattttgaataacattacagcaaaaagttgaaagacaaaaaaaaaaacccccgaacagagtgctttgggtcccaagcttctttagactgtgttcggcgttccccctaaatttctccccctatatctcactcacttgtcacatcagcgttctctttccccctatatctccacgctctacagcagttccacctatatcaaacctctataccccaccacaacaatattatatactttcatcttcaactaactcatgtaccttccaatttttttctactaataattatttacgtgcacagaaacttagcaaggagagagagagcgggtcgtggagcagtacgagcgcaccgagggccgccaccacctgttcctgtagcggccaacgatccccggcggtgtcccccactgaagaaactatgtgctgtagtatagccgctgcccgctggctagctagctagttgagtcatttagcggcgatgattgagtaataatgtgtcacgcatcaccatgcatgggtggcagtgtcagtgtgagcaatgacctgaatgaacaattgaaatgaaaagaaaaaagtattgttccaaattaaacgttttaaccttttaataggtttatacaataattgatatatgttttctgtatatgtctaatttgttatcatccatttagatatagacaaaaaaaatctaagaactaaaacaaatgctaatttgaaatgaagggagtatatattgggataatgtcgatgagatccctcgtaatatcaccgacatcacacgtgtccagttaatgtatcagtgatacgtgtattcacatttgttgcgcgtaggcgtacccaacaattttgatcgactatcagaaagtcaacggaagcgagtcgacctcgagggggggccccggccgaagcttcggccggggcccatcgataacgagtatcggtccccattgacacatctactcctaacgctaacaacattcttcacttctagtgtatggcatcgacaattggtactttaatcttgggtcttcacttttacaactaaacaacccaaatataaatattatttgagtgggtttggtgttcatcagaacattcccatctttggtaatgctacctagcataaaagtgagctatcacgttgggcagcccattccatgcaatttttaccttcctcaaaaaaaatctttgatatatttatggtataataatttaaacttcacattgatcataattttttcagcaaataagttccataatttggtgtttgcaatatcgaaattgttactcatagggtccagttgatttaatgacattagtgttgttaagttcacatgcttcaaagaattctacatgtctacaatgctgcatttgtctgtaaaatttgggttcttgtaaaaaatacatgtgttgaatatttaccaaaaaaatataatgcgatatgactttgtgtgagcatgtttggacacagttacaagtttacttctaaacttatattatgttttgcttcgtgcaagtacaagtgatttgaatatccaaggccaaagcatgtgtccatcactatatcaaatcaacataccatatatgtatatactcaacaaaaagcacaaataatcacatctatgttataaacacacccccacacaaccaaacattaacattcaataggttgtgctaggacatcattgggatgatgaagtaatattgtattatctatgtattgaccaagcatgagtttaaaattacgatttgatgttttcagttatttatatgatgaacatagttcagaaatatatcgagataaatctcaatcaatatattgattatttctaggaaacacatgccggtatgagggcaccattgtcgagtacatcttaagtgaggttaccgaattcgagctcggtaccctggttcacaaactcaatacaacacacagtggagtagggtattacgctccggcggcccgaaccactctaaatccttgtgtcctcgtgtgctcttccaccattaatgactgtaattgcagggacacgaagagttgtagcgcttttgccaacaagatccgctatatgctagtagagtggaacctgcacagcaacaagcatccaataatctgagaataagaattatgtgtggtgatggttctcatctctgcaactcgccattttcgcgagagaaccaaatccaagttggtgaagatcatgatttgggctcatgggctggcatagtagctattacctttgcaattgtggttcgaatctatccgatattctccttttcagggagagctaatgcttatgcttattgggtattttggtttgacactgcttcacgcccaaaaaaaggcaactatgtctgagttggatatggcccaaaaaaaggcagctatgtctgagttggatatggaagtcttctttcgtttagggtgaagtaagaccaagctcatgagcttattatcttaggtcggaacaaattagttgataggcatggcacatttatcaaattataatgattttaacagaaaagcaacacctctttttcagcagcaccagctttgcaagctgcaattgacactccaagcatagtatttgctccaaactcagcctgcatttcgcacaatatcatatctatttccatttggataaaatatattttccagaaatatgggaacagaatcaagatacagaaaaaagttgtggtagtagtggtaagtggaaacacaagtacagtgaaaagatagcattatttctgaacagtcaaattaaccgaaataagtagtatcacatactgcccctaaattgactacacccaatgtaaagaattgcttgagcatattgagccatcagttgtttgtttgtgtaacggatttgacaatgcagagttcaggagcaaaaaaccgcaaaggagagaaagagggaaaggatctcctagtatcccaccttgtggcgcgccctgtcaagtgcatgatggcctggtcgatctgcgtctgctgctgcggttccatcccaacgagtgcctccgacaccttgtcgttgatcacccgcaccgcgtaggcgacccccctggcgaggaacttccgcctctcggaggccccggccgcgtcggcggcggcgccctcgagcgcgcccacgctagccgtagatgctcggtgcacggccttgttggtgtgcaactcgacctcaacggccggtgcgctacgcccgtcaaggatctggcgcgcccgcaccctcgtgatcacggtgggcgcctcccgcctcatgtggccgacgatgaaaagcgccgggttaggggccttggcgcgcaccgccgtattcagggcctcctcgctcttgcgcgagagcaggtgcttccccaggtactcctgcactgacaaggctgccacagcggtggaatttgtcctcacgacttcgccacgtcgtcctcacctccctggcttcccacgactccgccgtatcgaggtgctcggtgggtcgtcttaatccgaagtccgaactaggaagacgagacagagaggtctgaggaatgggcctcgtttgatgttgagctgaattatttttccagcataagcccaggtcttggtccatgaacaaaattactagaaacccagcccagtactacgatctaaaagagggactgccactggatagctctctctagcattctccacgctccaatacagcggcgtcgtgtctatccgggtctatccgcgaacacgtgagaactctccagaaactgctttctcctccacttcatctctctcgctttccctctataaaaagaccccttctaggaattgagggagacagcaagcaccaagcagcgatccgaagctcaatcaattcactcaaacctcttccccaaatcttcgattagatcttcgttgacaagaagactagaaccgaacctgacatgtccaacctgctcacggttcaccagaaccttccggctcttccagtggacgcgacgtccgatgaagtcaggaagaacctcatggacatgttccgcgacaggcaagcgttcagcgagcacacctggaagatgctgctctccgtctgccgctcctgggctgcatggtgcaagctgaacaacaggaagtggttccccgctgagcccgaggacgtgagggattaccttctgtacctgcaagcgcgaggtttgtttctgcttctacctttgatatatatataataattatcattaattagtagtaatataatatttcaaatatttttttcaaaataaaagaatgtagtatatagcaattgcttttctgtagtttataagtgtgtatattttaatttataacttttctaatatatgaccaaaacatggtgatgcctaggtctggcagtgaagaccatccagcaacaccttggacaactgaacatgcttcacaggcgctccggcctcccgcgccccagcgactcgaacgccgtgagcctcgtcatgcgccgcatcaggaaggaaaacgtcgatgccggcgaaagggcaaagcaggccctcgcgttcgagaggaccgatttcgaccaggtccgcagcctgatggagaacagcgacaggtgccaggacattaggaacctggcgttcctcggaattgcatacaacacgctcctcaggatcgcggaaattgcccgcattcgcgtgaaggacattagccgcaccgacggcggcaggatgcttatccacattggcaggaccaagacgctcgtttccaccgcaggcgtcgaaaaggccctcagcctcggagtgaccaagctcgtcgaacgctggatctccgtgtccggcgtcgcggacgacccaaacaactacctcttctgccgcgtccgcaagaacggggtggctgcccctagcgccaccagccaactcagcacgagggccttggaaggtattttcgaggccacccaccgcctgatctacggcgcgaaggatgacagcggtcaacgctacctcgcatggtccgggcactccgcccgcgttggagctgctagggacatggcccgcgccggtgtttccatccccgaaatcatgcaggcgggtggatggacgaacgtgaacattgtcatgaactacattcgcaaccttgacagcgagacgggcgcaatggttcgcctcctggaagatggtgactgaggtacccaacctagacttgtccatcttctggattggccaacttaattaatgtatgaaataaaaggatgcacacatagtgacatgctaatcactataatgtgggcatcaaagttgtgtgttatgtgtaattactagttatctgaataaaagagaaagagatcatccatatttcttatcctaaatgaatgtcacgtgtctttataattctttgatgaaccagatgcatttcattaaccaaatccatatacatataaatattaatcatatataattaatatcaattgggttagcaaaacaaatctagtctaggtgtgttttgcgaatgcggcctccggattcttatgtgcttctagtctccaaatgtggttgatagttattttgctctaagatcaacagtaatgaagtataaatcatcgttgtggtgtgctactcggttaattgagcattaacacacacaaacatgacgaggatggtataatctccaaaaatgtgtactttgttaggtgggaccctatagccttgattaatgtgctatgttaggcatgcctggaaacgtgtgacgcatatgttttgtgaacctgttgatattatatgtgcttttatattaccatattttattaaaatactaatatttattactagtaagatataacattctatctagcttaaaaactaaccataaatattccataataactagatttaccaaactaatatactaaatatacataataaatacaaaattaacaagacaataatcaatatttatgagcttaatatatttagacattatggttggtcgacgataatcatgctaacttttcgtaattgcttgattgaaatatgcttagaataatgcctctttgttctacatggcaaatagggaccattatggtgtaacaccctgggaaccacaaacaccccgaaatgctactaaactacacaactaaccttcatatataaaatttcgacagcatctcctttgaaaatttgcatagacgtggaagcaacagagtataaacagatatcatgataagaaaacatactagacattaataatctgctagaaatgggaagaatcacgcgtaagcttgcatgcctgcagtgcagcgtgacccggtcgtgcccctctctagagataatgagcattgcatgtctaagttataaaaaattaccacatattttttttgtcacacttgtttgaagtgcagtttatctatctttatacatatatttaaactttactctacgaataatataatctatagtactacaataatatcagtgttttagagaatcatataaatgaacagttagacatggtctaaaggacaattgagtattttgacaacaggactctacagttttatctttttagtgtgcatgtgttctcctttttttttgcaaatagcttcacctatataatacttcatccattttattagtacatccatttagggtttagggttaatggtttttatagactaatttttttagtacatctattttattctattttagcctctaaattaagaaaactaaaactctattttagtttttttatttaataatttagatataaaatagaataaaataaagtgactaaaaattaaacaaataccctttaagaaattaaaaaaactaaggaaacatttttcttgtttcgagtagataatgccagcctgttaaacgccgtcgacgagtctaacggacaccaaccagcgaaccagcagcgtcgcgtcgggccaagcgaagcagacggcacggcatctctgtcgctgcctctggacccctctcgagagttccgctccaccgttggacttgctccgctgtcggcatccagaaattgcgtggcggagcggcagacgtgagccggcacggcaggcggcctcctcctcctctcacggcaccggcagctacgggggattcctttcccaccgctccttcgctttcccttcctcgcccgccgtaataaatagacaccccctccacaccctctttccccaacctcgtgttgttcggagcgcacacacacacaaccagatctcccccaaatccacccgtcggcacctccgcttcaaggtacgccgctcgtcctcccccccccccctctctaccttctctagatcggcgttccggtccatgcatggttagggcccggtagttctacttctgttcatgtttgtgttagatccgtgtttgtgttagatccgtgctgctagcgttcgtacacggatgcgacctgtacgtcagacacgttctgattgctaacttgccagtgtttctctttggggaatcctgggatggctctagccgttccgcagacgggatcgatttcatgattttttttgtttcgttgcatagggtttggtttgcccttttcctttatttcaatatatgccgtgcacttgtttgtcgggtcatcttttcatgcttttttttgtcttggttgtgatgatgtggtctggttgggcggtcgttctagatcggagtagaattctgtttcaaactacctggtggatttattaattttggatctgtatgtgtgtgccatacatattcatagttacgaattgaagatgatggatggaaatatcgatctaggataggtatacatgttgatgcgggttttactgatgcatatacagagatgctttttgttcgcttggttgtgatgatgtggtgtggttgggcggtcgttcattcgttctagatcggagtagaatactgtttcaaactacctggtgtatttattaattttggaactgtatgtgtgtgtcatacatcttcatagttacgagtttaagatggatggaaatatcgatctaggataggtatacatgttgatgtgggttttactgatgcatatacatgatggcatatgcagcatctattcatatgctctaaccttgagtacctatctattataataaacaagtatgttttataattattttgatcttgatatacttggatgatggcatatgcagcagctatatgtggatttttttagccctgccttcatacgctatttatttgcttggtactgtttcttttgtcgatgctcaccctgttgtttggtgttacttctgcaggtcgactttaacttagcctaggatccgcccatggtcgaacaggacggcctgcatgcaggatcaccagcggcctgggtcgaaagactcttcggctacgactgggcacaacagaccatcgggtgtagcgacgcagctgttttcaggctgtccgcacagggcagacccgttttgttcgtcaaaacagacctgtctggcgcgctcaacgaactgcaagacgaggccgcaagactgagctggcttgctaccacaggcgttccttgtgctgcagtcctcgacgtcgttactgaggctggaagagactggctgctcctgggtgaagtcccaggacaggaccttttgtccagccatctggcacctgccgaaaaggtcagcatcatggcagacgccatgagaaggctgcacacactcgaccctgcaacatgccccttcgatcaccaggcaaaacacaggatcgagcgcgcaagaacgcgcatggaggctggtttggtcgaccaagatgacctcgacgaggaacaccaaggactggctcctgctgaactcttcgccagactcaaggcgagaatgccagacggtgacgacctggtcgtcacacacggcgacgcttgtctcccaaacataatggtcgagaacggacgcttcagcggtttcatcgactgcggtagactcggagtcgctgacagataccaggacatcgccctggcaacacgcgacatcgcagaggaactcggaggcgaatgggctgacaggtttctcgtgctctacggtatcgctgctccagacagccagaggatcgcattctacaggctcctcgacgagttcttttagttcgaacggtacccggggatcctctagtgccgtgggtcgtttaagctgccgctgtacctgtgtcgtctggtgccttctggtgtacctgggaggttgtcgtctatcaagtatctgtggttggtgtcatgagtcagtgagtcccaatactgttcgtgtcctgtgtgcattatacccaaaactgttatgggcaaatcatgaataagcttgatgttcgaacttaaaagtctctgctcaatatggtattatggttgtttttgttcgtctcctaatatttgcctgggatcaaattttattggctggtgttcatttgacctccatgttcttgctaggctccattttttactctacagccataatatgtttgattgtttggtttgttctttgttgtacacctggttctgtcgagcttagttttcgacactggcttacagcttaacatgttgctattttattgggttctgattgctattttattgggttctgattgctagtttttgctgaatccaaaaaccatgttatttatttaagcgatccaggttattattatgatggtggctaagtttttttttttccaagggtaaattttctggattctccagtgtttctgtggccgaattcaatcactagagtcgacctgcaggcatgcccgcggtggagctcgaattccggtccgggcctagaaggccatttataacttcgtatagcatacattatacgaagttatagtcctactagttagttaggcgatcgccctatttacaaaaataagggctcatgtatatctatttagatattgacatttgtcaaacaacagataagctatatatgatatggcacttagtcaattttgacatttagttatcaattaggctggttagcttaatcattcggactaggcaaaaattttgggctaaggatattcaatatggctaaaatatttaaaaagaacaacttcaattcactcctaatccaaacgagggaaaaaccttttcatggactttgttactattccttttttatttatgaagaaattaattgtatgactgtgaaataatgactgcagttgttgtgctcactgaaagagcaaggagcgcaaggagggcaaatatcatgggctccaaatatttccttacatgttgtattatagggtcatgcacaatttgggttctagcaaaaaacatatgcaccaaatttttactaaaaacaataactaagaggtaagacttcgcgcgaacaactttgcacacacatataggtttactcatgaacttatattatgttttgcttggtatatgtgcacctgatttgagtgttcacggtcaaagcatatgtgccaatcactttctcaaaagaacatatcacagatttaagtactcaactacaagcacgtacagtcacatctatcttataaacacacaagcacacatccaaacaagaacattcaagcggttcgagctggcacatctttggcttggtgaagtatgcggtattgtctacatattaaccaagcatgtatctttaattttgatttgatgttttcaaatgaatatacaaagaacactcttaagaaattgactcaaattaattctcaaacaatatattgattatttattggaagttgcacacgccgatatatatgagacctttgttatgaagtacaactcatatgtattagatcttgggcgatcgcgctgacaagcggtatttcctagaaggccatttatcgctatcaactttgtatagaaaagttgggccgaattcgagctcggtacggccagaatggcccggaccgaagcttgcatgcctgcagtgcagcgtgacccggtcgtgcccctctctagagataatgagcattgcatgtctaagttataaaaaattaccacatattttttttgtcacacttgtttgaagtgcagtttatctatctttatacatatatttaaactttactctacgaataatataatctatagtactacaataatatcagtgttttagagaatcatataaatgaacagttagacatggtctaaaggacaattgagtattttgacaacaggactctacagttttatctttttagtgtgcatgtgttctcctttttttttgcaaatagcttcacctatataatacttcatccattttattagtacatccatttagggtttagggttaatggtttttatagactaatttttttagtacatctattttattctattttagcctctaaattaagaaaactaaaactctattttagtttttttatttaataatttagatataaaatagaataaaataaagtgactaaaaattaaacaaataccctttaagaaattaaaaaaactaaggaaacatttttcttgtttcgagtagataatgccagcctgttaaacgccgtcgacgagtctaacggacaccaaccagcgaaccagcagcgtcgcgtcgggccaagcgaagcagacggcacggcatctctgtcgctgcctctggacccctctcgagagttccgctccaccgttggacttgctccgctgtcggcatccagaaattgcgtggcggagcggcagacgtgagccggcacggcaggcggcctcctcctcctctcacggcaccggcagctacgggggattcctttcccaccgctccttcgctttcccttcctcgcccgccgtaataaatagacaccccctccacaccctctttccccaacctcgtgttgttcggagcgcacacacacacaaccagatctcccccaaatccacccgtcggcacctccgcttcaaggtacgccgctcgtcctcccccccccccctctctaccttctctagatcggcgttccggtccatgcatggttagggcccggtagttctacttctgttcatgtttgtgttagatccgtgtttgtgttagatccgtgctgctagcgttcgtacacggatgcgacctgtacgtcagacacgttctgattgctaacttgccagtgtttctctttggggaatcctgggatggctctagccgttccgcagacgggatcgatttcatgattttttttgtttcgttgcatagggtttggtttgcccttttcctttatttcaatatatgccgtgcacttgtttgtcgggtcatcttttcatgcttttttttgtcttggttgtgatgatgtggtctggttgggcggtcgttctagatcggagtagaattctgtttcaaactacctggtggatttattaattttggatctgtatgtgtgtgccatacatattcatagttacgaattgaagatgatggatggaaatatcgatctaggataggtatacatgttgatgcgggttttactgatgcatatacagagatgctttttgttcgcttggttgtgatgatgtggtgtggttgggcggtcgttcattcgttctagatcggagtagaatactgtttcaaactacctggtgtatttattaattttggaactgtatgtgtgtgtcatacatcttcatagttacgagtttaagatggatggaaatatcgatctaggataggtatacatgttgatgtgggttttactgatgcatatacatgatggcatatgcagcatctattcatatgctctaaccttgagtacctatctattataataaacaagtatgttttataattattttgatcttgatatacttggatgatggcatatgcagcagctatatgtggatttttttagccctgccttcatacgctatttatttgcttggtactgtttcttttgtcgatgctcaccctgttgtttggtgttacttctgcaggtcgactttaacttagcctaggaagttcctattccgaagttcctattctctagaaagtataggaacttcggatccagccatggctgcgaccactctcacgagcgctctcccaggagcctttagcagctctcagagaccttcggctccgttcaacctccagaggagccctagagtcctcagacgcttcaaccgcaagaccggtagacagccacgcggtctcgtgagagctgctaaggctcagatgcagaacctccccgagaagttcgatgaaacacgcctctgggaggcattgcgcggattcggagtctcccctagcagagtgacctacgccccagtcggattcggcgattaccactggaccgtcaccgacgaggacggtagaccctggttcgcaaccgtcagcgacctcgagcacaaggagcactgcggacaaggtgctcaagcagcactgaagggcctcagacaggcgatggacacagcactcgccttgagggacagagacggacttcgcttcgtcgtcgcacctgtggcagcaacagacggaggtggaccagtgcttccactggacgcaagatacgccctgacagtgttcccccacgtcccaggaagaacaggcgagttcggacaacgcctgaccgaagcagaacgcgatcgcctcctcgcattgcttgccgaactccacggacggactccaccagaaacaacccccccagcagacatggaacccccaggacttccaggagtcagagcagctctcgcggaaagcgaaggaccttggtccggaggaccctttgccgaaccagcacggcttctcttgagagaacacgaggcgaccctccacgcgagacttgctgaattcgaggccctggtcgcaagggtcaagggcagaggagcaccactggtcgttacacacggcgaaccgcatccaggcaacctcatcctgggagaagagggctacctgctcgtcgactgggacacagtgggattggctccagctgaacgcgacctcagcttgatcagcgacgatccagcggacctcgcgagatatgccgaactcacaggacggacgccagaccccgatgctcttgcactctacagactgcgctggagcctcctcgatgtggcagagttcgtcgagtggttcagagccgagcaccagagaacccaggacaccgagagcgcatggaagggcttcacagacacactgggccagttggcagctgggggttctgctgcgtagttcgaactggccagctaagcggtaccgttaacgccgtgggtcgtttaagctgccgctgtacctgtgtcgtctggtgccttctggtgtacctgggaggttgtcgtctatcaagtatctgtggttggtgtcatgagtcagtgagtcccaatactgttcgtgtcctgtgtgcattatacccaaaactgttatgggcaaatcatgaataagctagatgttctaacttaaaagtctctgctcaatatggtatttaggttgtttttgttcgtctcctaatatttgcctgggatcaaattttattggctggtgttcatttgacctccttgttcttgctaggctccattttttactctacagccataatatgtttgattgtttggtttgttctttgttgtacacctggttctgtcgagcttagttttcgacactggcttacagctttagatgttgctattttattgggttctgattgctattttattgggttctgattgctagtttttgctgaatccaaaaaccatgttatttatttaagcgatccaggttattattatgatggtggctaagtttttttttttccaagggtaaattttctggattctccagtgtttctgtggccacttaagcttcggtccgggcctagaaggccagcttcggccgccccgggcaactttattatacaaagttgatagataaatcagataaatcatcattctaggcgcgccacttacgcttgattccgatgacttcgtaggttcctagctcaagccgctcgtgtccaagcgtcacttacgattagctaatgattacggcatctaggaccgactagctagctagctaagagctcggtaccgagctcgaattcattccgattaatcgtggcctcttgctcttcaggatgaagagctatgtttaaacgtgcaagcgctactagacaattcagtacattaaaaacgtccgcaatgtgttattaagttgtctaagcgtcaatttgtttacaccacaatatatcctgccaccagccagccaacagctccccgaccggcagctcggcacaaaatcaccactcgatacaggcagcccatcagtccgggacggcgtcagcgggagagccgttgtaaggcggcagactttgctcatgttaccgatgctattcggaagaacggcaactaagctgccgggtttgaaacacggatgatctcgcggagggtagcatgttgattgtaacgatgacagagcgttgctgcctgtgatcaaatatcatctccctcgcagagatccgaattatcagccttcttattcatttctcgcttaaccgtgacaggctgtcgatcttgagaactatgccgacataataggaaatcgctggataaagccgctgaggaagctgagtggcgctatttctttagaagtgaacgttgacgatcgtcgggcccaggtagaatccgcctgagtcgcaagggtgacttcgcctatattggacgacggcgcgcagagggcgacctctttttgggttacgattgtaggattatcactaaaacaatacatgaacatattcaaatggcaatctctctaaggcattggaaataaatacaaataacagttgggtggagtttttcgacctgtgggcgttaaccttctgttaacctaaaagctcttgcccaaacagcagaatcggcgctaattgccagcggcggaacttttccagtttcgcgaaaaatatcgccactggcaaggaatgggtttgagatggcgaagtctgtcctaaaagcagcgcctgtagttgtagggttgacggccttgatggagcgtcatgccgatgccctctcgagccaacttcaagcacatcatcttaaggttttcccgccgcattccgagaagggcattcgaacattcgggccatcggaggcgtccaagctgctcggcgttggcgagtcatatttacggcagaccgcgtctgagatgccagagttgaatgttagcatgagcccgggtggcaggcgaatgttctcaattgaagatatccatgcgattcggaagtatatggatcaggtcggccgcgggaaccggcgctacctgccacatcgtcgaggcggcgagcagcttcaggttatctctgtgatgaatttcaaaggtgggtcgggtaagaccaccaccgccgcgcatctggcgcagtacctcgctatgcgcggatatcgagtcttggccattgatctcgatcctcaagcgagcctttctgcactctttgggagccaaccggagacggacgttggcccgaacgaaacgctctacggcgctataaggtatgatgatgagcaggtggcaatcgaacgagtcgtccgagggacttacattcccgacctccacctgattcctggtaatcttgagctgatggagtttgaacacgatacgccacgcgcgctgatgaaccgcaaagagggcgacacgctcttttatggtcgcatcagccaagtaattgaagatatcgcggataactatgacgtcgtggtcatcgactgccctccccagcttgggtatctcacgctatccgcattgactgcggcgacgtccattcttgtcacggtccatccgcagatgctggatgtgatgtcgatgaaccagtttctggcaatgacatcgaaccttttgcgtgaaatcgagaatgctggcgccaagttcaagtttaattggatgcgctatctgataacccgtttcgaaccgagcgacggaccacagaaccaaatggtaggttatctgcggtcgatttttggcgaaaatgtcctcaattttccgatgcttaaaaccaccgcggtttcggacgctggcctgacaaaccagactctattcgaagtggagcgtggcctgttcacgcgctcgacctatgatcgagccttggaggcgatgaacgccgtcaacgacgagatcgaaacactgatcaaaaaagcatggggtaggcccacatgagccggaagcacatccttggcgtctcaactgacgcccctgagacgtcgcccgccgacaataggacggcaaagaaccgctccatgccgctcctcggcgtaacaaggaaggagcgcgatccggcaacgaagctcacagcgaacattggtaacgcactgcgagagcaaaacgatcgtcttagccgtgccgaagagatcgagcggcgtctcgctgaaggtcaggcagtgatagagttggatgcctcgtcaatagaaccgtctttcgtgcaggatcgtatgcgaggggacattgacgggctccttacttcgatccgggaacaaggacagcaagtcccaatccttgtgcgaccgcatccgagccagccgggccgatatcaggttgccttcggccaccgccggctacgcgccgtttcagaactcggacttccggtcagagcggtcgttcgcgaactgacggacgagcaagtggtcgtagcacagggtcaggaaaacaatgagcgcgaagatcttaccttcatcgaaaaggcgcgcttcgcacatcgcctgaacaggcagttttctcgagagattgtcatcgccgcgatgtcgatcgacaagagcaatttgtccaagatgcttctgctcgttgacgccctcccctctgaactgaccgatgctattggtgccgctcctggtgttggacggccgagttggcaacaacttgccgagctgattgagaaagtttcttcaccggccgacgtggctaaatatgctatgtcggaggaagttcaagcgctgccatcggcagaacgattcaaggcggtgatcgctagtctgaagcccagtcgggttgcgcgtggacttcccgaggtcatggccaccccagacggcaccagaattgcacaggtgacgcagagcaaggccaaactggaaatcacgattgacaggaaggcgacgcccgattttgcgaccttcgtgctcgatcatgtgccagcgctgtatcaagcgtaccacgctgagaaccaacggaaacggggagagtaaaccgcaaaagaaaagagccccctcaacgtcgccgtcgcggaagcccttctgtctctctagcgcgaacagaatcgcatttcctcgaatcctcgtcaagagtttttagcgccgttttggtgagctgatttcctttgcctgctgaaaggtgaaagatgatgcagacaggaagtgtaacgacgccattcgggcggcggccaatgacgcttgcgcttgtgcggcgccagacggcgctggccgatatcaaacaaggcaagacagcggacaagtggaaggtctttagagacgcgtccgcggctatggaactacttggaatccagtccaacagtcttgccgtccttgatgcgctattgagctttcacccggaaacggagttgcgtcaggaggcacagctgatcgtcttcccgtcgaatgctcagcttgcccttcgggcgcatgggatggctggcgcgactttgcgtaggcacatcgccatgctcgtggagtcaggcttgatcgtccggaaggatagcgccaacggaaagcgttacgctcgtaaggatggcgctggtcagatcgagcgcgcgtttggcttcgatttgtctccgcttctcgcgcggtcggaagagctagcgatgatggcacagcaggtgatggccgatcgagcagcattcaggatggccaaagaaagtctgacgatttgccgacgggacgttcggaaggtaattacggcagctatggaagagggagcggagggcgactggcaagctgtcgaggaagtctatgtggaacttgtgggtagaattccacgcgccccgacgcttgctgatgtagagtcaattctcgaagagatgtggatgctccaggaagagataatcaaccggttggaaattagagacaattcagaaaataatagcaccaatgctgcccagagcgagcagcacatacagaattcaaaacccgaatccgttaatgaacttgaacctcgctctgaaaaggagcagggcgctaagccgagtgaaatagaccgggcaaggagcgagccgataaaagcgttccccctcgggatgatcctgaaagcatgcccgaccattggcaactatgggccgagcggtgcggttgctagctggcgtgacctcatgtcggctgcggtggtggttcggtctatgctgggggtcagcccgtcggcttaccaagacgcgtgtgaggcaatgggaccggagaatgcggcagcagcgatggcgtgcattttggagcgagcgaacttcatcaattcgcccgggggctatctccgagatctgacacggcggagcgagcttgggaagttttcacttggcccgatgataatggcgctcttgaaggctagcgggcaggggacgttgcggtttggctagaattagcgagtatggagcaggatggtctgtggtcagctgaccacagacctaataggttgaaaacatgagcgttttttggatgatcgacagaccatccgattcccggagtaccaagcgtgctctgatgggagcgataacattactcaacaagcacgaaggccccatgccgatcgttgatcgtgaaggagagcctgctctacatgcggcggtattttgccggccgaggcatgtagtcgcggagcactgcctatttactgccgtgccacctgggtccttttcatcacgtgctataaaaataattataatttaaattttttaatataaatatataaattaaaaatagaaagtaaaaaaagaaattaaagaaaaaatagtttttgttttccgaagatgtaaaagactctagggggatcgccaacaaatactaccttttatcttgctcttcctgctctcaggtattaatgccgaattgtttcatcttgtctgtgtagaagaccacacacgaaaatcctgtgattttacattttacttatcgttaatcgaatgtatatctatttaatctgcttttcttgtctaataaatatatatgtaaagtacgctttttgttgaaattttttaaacctttgtttatttttttttcttcattccgtaactcttctaccttctttatttactttctaaaatccaaatacaaaacataaaaataaataaacacagagtaaattcccaaattattccatcattaaaagatacgaggcgcgtgtaagttacaggcaagcgatccgtcctaagaaaccattattatcatgacattaacctataaaaataggcgtatcacgaggccctttcgtctcgcgcgtttcggtgatgacggtgaaaacctctgacacatgcagctcccggagacggtcacagcttgtctgtaagcggatgccgggagcagacaagcccgtcagggcgcgtcagcgggtgttggcgggtgtcggggctggcttaactatgcggcatcagagcagattgtactgagagtgcaccataccacagcttttcaattcaattcatcattttttttttattcttttttttgatttcggtttctttgaaatttttttgattcggtaatctccgaacagaaggaagaacgaaggaaggagcacagacttagattggtatatatacgcatatgtagtgttgaagaaacatgaaattgcccagtattcttaacccaactgcacagaacaaaaacctgcaggaaacgaagataaatcatgtcgaaagctacatataaggaacgtgctgctactcatcctagtcctgttgctgccaagctatttaatatcatgcacgaaaagcaaacaaacttgtgtgcttcattggatgttcgtaccaccaaggaattactggagttagttgaagcattaggtcccaaaatttgtttactaaaaacacatgtggatatcttgactgatttttccatggagggcacagttaagccgctaaaggcattatccgccaagtacaattttttactcttcgaagacagaaaatttgctgacattggtaatacagtcaaattgcagtactctgcgggtgtatacagaatagcagaatgggcagacattacgaatgcacacggtgtggtgggcccaggtattgttagcggtttgaagcaggcggcagaagaagtaacaaaggaacctagaggccttttgatgttagcagaattgtcatgcaagggctccctatctactggagaatatactaagggtactgttgacattgcgaagagcgacaaagattttgttatcggctttattgctcaaagagacatgggtggaagagatgaaggttacgattggttgattatgacacccggtgtgggtttagatgacaagggagacgcattgggtcaacagtatagaaccgtggatgatgtggtctctacaggatctgacattattattgttggaagaggactatttgcaaagggaagggatgctaaggtagagggtgaacgttacagaaaagcaggctgggaagcatatttgagaagatgcggccagcaaaactaaaaaactgtattataagtaaactaggcacaaacgttgactcttggatcgagctggcagacaaagcaataacccacacagaggacgattaatggctgacgaagagatccagaatccgccggacggtactgctgctgccgaagttgagccggctgctcctagaggtagaagagcaaagaaagcaccagccgaaacagcccgcacgggatcgttcaaatccgtgaagccgaaaacccgcggcctcagcaaccgagaaaaactggagaagatcggtcaaatcgaagctcaggtcgctggcggcgcaaccttgaaggacgccgttaagatcgtgggtatttccgttcagacctattatcaatggaagagagctgcggttcaacctgtctcacagaatccggccgtgtctgtttcagttgacgatgaactcggcgagttcatccaactcgaggaggaaaatatgcatggcatgcccgttccatacagaagctgggcgaacaaacgatgctcgccttccagaaaaccgaggatgcgaaccacttcatccggggtcagcaccaccggcaagcgccgcgacggccgaggtcttccgatctcctgaagccagggcagatccgtgcacagcaccttgccgtagaagaacagcaaggccgccaatgcctgacgatgcgtggagaccgaaaccttgcgctcgttcgccagccaggacagaaatgcctcgacttcgctgctgcccaaggttgccgggtgacgcacaccgtggaaacggatgaaggcacgaacccagtggacataagcctgttcggttcgtaagctgtaatgcaagtagcgtatgcgctcacgcaactggtccagaaccttgaccgaacgcagcggtggtaacggcgcagtggcggttttcatggcttgttatgactgtttttttggggtacagtctatgcctcgggcatccaagcagcaagcgcgttacgccgtgggtcgatgtttgatgttatggagcagcaacgatgttacgcagcagggcagtcgccctaaaacaaagttaaacatcatgagggaagcggtgatcgccgaagtatcgactcaactatcagaggtagttggcgtcatcgagcgccatctcgaaccgacgttgctggccgtacatttgtacggctccgcagtggatggcggcctgaagccacacagtgatattgatttgctggttacggtgacggtaaggcttgatgaaacaacgcggcgagctttgatcaacgaccttttggaaacttcggcttcccctggagagagcgagattctccgcgctgtagaagtcaccattgttgtgcacgacgacatcattccgtggcgttatccagctaagcgcgaactgcaatttggagaatggcagcgcaatgacattcttgcaggtatcttcgagccagccacgatcgacattgatctggctatcttgctgacaaaagcaagagaacatagcgttgccttggtaggtccagcggcggaggaactctttgatccggttcctgaacaggatctatttgaggcgctaaatgaaaccttaacgctatggaactcgccgcccgactgggctggcgatgagcgaaatgtagtgcttacgttgtcccgcatttggtacagcgcagtaaccggcaaaatcgcgccgaaggatgtcgctgccgactgggcaatggagcgcctgccggcccagtatcagcccgtcatacttgaagctagacaggcttatcttggacaagaagaagatcgcttggcctcgcgcgcagatcagttggaagaatttgtccactacgtgaaaggcgagatcaccaaggtagtcggcaaataatgtctaacaattcgttcaagccgacgccgcttcgcggcgcggcttaactcaagcgttagatgcactatactaaccaactagtgcgctcttccgcttcctcgctcactgactcgctgcgctcggtcgttcggctgcggcgagcggtatcagctcactcaaaggcggtaatacggttatccacagaatcaggggataacgcaggaaagaacatgtgagcaaaaggccagcaaaaggccaggaaccgtaaaaaggccgcgttgctggcgtttttccataggctccgcccccctgacgagcatcacaaaaatcgacgctcaagtcagaggtggcgaaacccgacaggactataaagataccaggcgtttccccctggaagctccctcgtgcgctctcctgttccgaccctgccgcttaccggatacctgtccgcctttctcccttcgggaagcgtggcgctttctcatagctcacgctgtaggtatctcagttcggtgtaggtcgttcgctccaagctgggctgtgtgcacgaaccccccgttcagcccgaccgctgcgccttatccggtaactatcgtcttgagtccaacccggtaagacacgacttatcgccactggcagcagccactggtaacaggattagcagagcgaggtatgtaggcggtgctacagagttcttgaagtggtggcctaactacggctacactagaagaacagtatttggtatctgcgctctgctgaagccagttaccttcggaaaaagagttggtagctcttgatccggcaaacaaaccaccgctggtagcggtggtttttttgtttgcaagcagcagattacgcgcagaaaaaaaggatctcaagaagatcctttgatcttttctacggggtctgacgctcagtggaacgaaaactcacgttaagggattttggtcatgagattatcaaaaaggatcttcacctagatccttttaaattaaaaatgaagcgtaccgacgatcttgctgcgttcggatattttcgtggagttcccgccacagacccggattgaaggcgagatccagcaactcgcgccagatcatcctgtgacggaactttggcgcgtgatgactggccaggacgtcggccgaaagagcgacaagcagatcacgcttttcgacagcgtcggatttgcgatcgaggatttttcggcgctgcgctacgtccgcgaccgcgttgagggatcaagccacagcagcccactcgaccttctagccgacccagacgagccaag

SEQ ID NO: 33 - DNA, 22347 bp, Artificial Sequence
  Synthetic construct comprising the T-DNA (RB to LB): RB+LoxP-NOS:WUS:PINII+ZMUBI:ODP2:PINII+RAB17:MOCRE:PINII+ ZMUBI-CTP-SPCN:SB-UBITERM+LB
ggatctttttggaatgctgctccgtcgtcaggctttccgacgtttgggtggttgaacagaagtcattatcgcacggaatgccaagcactcccgaggggaaccctgtggttggcatgcacatacaaatggacgaacggataaaccttttcacgcccttttaaatatccgattattctaataaacgctcttttctcttaggtttacccgccaatatatcctgtcaaacactgcggccgcacttgaccgcggatggagccggagctgtggtgaggccatcgacgggaggtgggggagaacacagtctcagtgttctttgtgagtccgcaaggtttttagcttttctgtattaattaaggttgctgttggctgtagaatacggtcgtggaagagctgtatcggtagctactacgtaagctattatatactggaagtctggagctcgtcgatctccggtcgtcttcctccatttctcctcgtcttgctttgactgctgctaccatttgcttctgttttctgatgaagcatgccatgtcggccaccagtgtttgtgtggtttttgcagggaatggctttcaagtgctgtgattgaatggccctcgtcgtcctcggctgagctcacatggacgcgtcatgtgagtgagatatatgatcatatgatgagtggggttcgggtgagtgcgtacttgaagtaggatcccgctttcactcattcattcattggcctttaaaccgggaaattttcgcgaggagatggagggaagcaagcagggtgacgagtgcagagtgccgcgagcgctttgtcaaaaggcaccgccgtaggcaaaaaaatcaatggccctgactgactcgatggtagtactactgtagagactagagagggttgctccccatatcttcgtgtgacttttactccagcattgcatttccgtcattgagacgttaattaatagcagctttcgggacagatgactgtggccatgtttcgtcacggccgcttcgtgccagctgggggtactatagtactgtgattttgttagtaaaaactttcattaggccaccattgacgaccgggccttcgcttttgctgcgctaattaaccatttcccggcgaccgaagggaacatgaacatgccccgacacatgagggcatgaggactagtgttctccctgtcgttcgttgacttgactagtgatagtttaaacgctcttcaactggaagagcggttactaccggttcactagctagctgctaatcgagctagttaccctatgaggtgacatgaagcgctcacggttactatgacggttagcttcacgactgttggtggcagtagcgtacgacttagctatagttccggacttacccttaagataacttcgtatagcatacattatacgaagttatgggcccacgcgtgaagagcggttaccagagctggtcacctttgtccaccaagatggaactgtcttcggccagaatggccatctggattcagcaggcctagaaggccatttatcgctatcaactttgtatagaaaagttgggccgaattcgagctcggtacggccagaatccggtaagtgactagggtcacgtgaccctagtcacttaaattcggccagaatggccatctggattcagcaggcgaggccggccacactgatagtttaaactgaaggcgggaaacgacaatctgatcatgagcggagaattaagggagtcacgttatgacccccgccgatgacgcgggacaagccgttttacgtttggaactgacagaaccgcaacgattgaaggagccactcagccgcgggtttctggagtttaatgagctaagcacatacgtcagaaaccattattgcgcgttcaaaagtcgcctaaggtcactatcagctagcaaatatttcttgtcaaaaatgctccactgacgttccataaattcccctcggtatccaattagagtctcatattcactctcccggcggatctcgactctagaggatcgctcaggaaggccgctgagatagagccatggcggccaatgcgggcggcggtggagcgggaggaggcagcggcagcggcagcgtggctgcgccggcggtgtgccgccccagcggctcgcggtggacgccgacgccggagcagatcaggatgctgaaggagctctactacggctgcggcatccggtcgcccagctcggagcagatccagcgcatcaccgccatgctgcggcagcacggcaagatcgagggcaagaacgtcttctactggttccagaaccacaaggcccgcgagcgccagaagcgccgcctcaccagcctcgacgtcaacgtgcccgccgccggcgcggccgacgccaccaccagccaactcggcgtcctctcgctgtcgtcgccgccgccttcaggcgcggcgcctccctcgcccaccctcggcttctacgccgccggcaatggcggcggatcggctgtgctgctggacacgagttccgactggggcagcagcggcgctgctatggccaccgagacatgcttcctgcaggactacatgggcgtgacggacacgggcagctcgtcgcagtggccacgcttctcgtcgtcggacacgataatggcggcggccgcggcgcgggcggcgacgacgcgggcgcccgagacgctccctctcttcccgacctgcggcgacgacggcggcagcggtagcagcagctacttgccgttctggggtgccgcgtccacaactgccggcgccacttcttccgttgcgatccaacagcaacaccagctgcaggagcagtacagcttttacagcaacagcaacagcacccagctggccggcaccggcaaccaagacgtatcggcaacagcagcagcagccgccgccctggagctgagcctcagctcatggtgctccccttaccctgctgcagggagtatgtgagagcaacgcgagctgccactgctcttcactgatgtctctggaatggaaggaggaggaagtgagcatagcgttggtgcgttgctgtcaagggcgaattgtaccacatggttaacctagacttgtccatcttctggattggccaacttaattaatgtatgaaataaaaggatgcacacatagtgacatgctaatcactataatgtgggcatcaaagttgtgtgttatgtgtaattactagttatctgaataaaagagaaagagatcatccatatttcttatcctaaatgaatgtcacgtgtctttataattctttgatgaaccagatgcatttcattaaccaaatccatatacatataaatattaatcatatataattaatatcaattgggttagcaaaacaaatctagtctaggtgtgttttgcgaatgcggccgccaccgcggtggagctcgaattccggtccgggttaccagagctggtcacctaagtgactagggtcacgtgaccctagtcacttattcccagcttcaagtttgtacaaaaaagcaggctccggccagaatggcccggaccgggttaccgaattcgagctcggtaccatttaaattgcgcccgccacggccgtggaggtcgtattccggtcagcttgcatccctgcagtgcagcgtgacccggtcgtgcccctctctagagataatgagcattgcatgtctaagttataaaaaattaccacatattttttttgtcacacttgtttgaagtgcagtttatctatctttatacatatatttaaactttactctacgaataatataatctatagtactacaataatatcagtgttttagagaatcatataaatgaacagttagacatggtctaaaggacaattgagtattttgacaacaggactctacagttttatctttttagtgtgcatgtgttctcctttttttttgcaaatagcttcacctatataatacttcatccattttattagtacatccatttagggtttagggttaatggtttttatagactaatttttttagtacatctattttattctattttagcctctaaattaagaaaactaaaactctattttagtttttttatttaataatttagatataaaatagaataaaataaagtgactaaaaattaaacaaataccctttaagaaattaaaaaaactaaggaaacatttttcttgtttcgagtagataatgccagcctgttaaacgccgtcgacgagtctaacggacaccaaccagcgaaccagcagcgtcgcgtcgggccaagcgaagcagacggcacggcatctctgtcgctgcctctggacccctctcgagagttccgctccaccgttggacttgctccgctgtcggcatccagaaattgcgtggcggagcggcagacgtgagccggcacggcaggcggcctcctcctcctctcacggcaccggcagctacgggggattcctttcccaccgctccttcgctttcccttcctcgcccgccgtaataaatagacaccccctccacaccctctttccccaacctcgtgttgttcggagcgcacacacacacaaccagatctcccccaaatccacccgtcggcacctccgcttcaaggtacgccgctcgtcctcccccccccccctctctaccttctctagatcggcgttccggtccatgcatggttagggcccggtagttctacttctgttcatgtttgtgttagatccgtgtttgtgttagatccgtgctgctagcgttcgtacacggatgcgacctgtacgtcagacacgttctgattgctaacttgccagtgtttctctttggggaatcctgggatggctctagccgttccgcagacgggatcgatttcatgattttttttgtttcgttgcatagggtttggtttgcccttttcctttatttcaatatatgccgtgcacttgtttgtcgggtcatcttttcatgcttttttttgtcttggttgtgatgatgtggtctggttgggcggtcgttctagatcggagtagaattctgtttcaaactacctggtggatttattaattttggatctgtatgtgtgtgccatacatattcatagttacgaattgaagatgatggatggaaatatcgatctaggataggtatacatgttgatgcgggttttactgatgcatatacagagatgctttttgttcgcttggttgtgatgatgtggtgtggttgggcggtcgttcattcgttctagatcggagtagaatactgtttcaaactacctggtgtatttattaattttggaactgtatgtgtgtgtcatacatcttcatagttacgagtttaagatggatggaaatatcgatctaggataggtatacatgttgatgtgggttttactgatgcatatacatgatggcatatgcagcatctattcatatgctctaaccttgagtacctatctattataataaacaagtatgttttataattattttgatcttgatatacttggatgatggcatatgcagcagctatatgtggatttttttagccctgccttcatacgctatttatttgcttggtactgtttcttttgtcgatgctcaccctgttgtttggtgttacttctgcaggtcgactctagaggatccatggccactgtgaacaactggctcgctttctccctctccccgcaggagctgccgccctcccagacgacggactccacactcatctcggccgccaccgccgaccatgtctccggcgatgtctgcttcaacatcccccaagattggagcatgaggggatcagagctttcggcgctcgtcgcggagccgaagctggaggacttcctcggcggcatctccttctccgagcagcatcacaaggccaactgcaacatgatacccagcactagcagcacagtttgctacgcgagctcaggtgctagcaccggctaccatcaccagctgtaccaccagcccaccagctcagcgctccacttcgcggactccgtaatggtggcttcctcggccggtgtccacgacggcggtgccatgctcagcgcggccgccgctaacggtgtcgctggcgctgccagtgccaacggcggcggcatcgggctgtccatgattaagaactggctgcggagccaaccggcgcccatgcagccgagggtggcggcggctgagggcgcgcaggggctctctttgtccatgaacatggcggggacgacccaaggcgctgctggcatgccacttctcgctggagagcgcgcacgggcgcccgagagtgtatcgacgtcagcacagggtggagccgtcgtcgtcacggcgccgaaggaggatagcggtggcagcggtgttgccggcgctctagtagccgtgagcacggacacgggtggcagcggcggcgcgtcggctgacaacacggcaaggaagacggtggacacgttcgggcagcgcacgtcgatttaccgtggcgtgacaaggcatagatggactgggagatatgaggcacatctttgggataacagttgcagaagggaagggcaaactcgtaagggtcgtcaagtctatttaggtggctatgataaagaggagaaagctgctagggcttatgatcttgctgctctgaagtactggggtgccacaacaacaacaaattttccagtgagtaactacgaaaaggagctcgaggacatgaagcacatgacaaggcaggagtttgtagcgtctctgagaaggaagagcagtggtttctccagaggtgcatccatttacaggggagtgactaggcatcaccaacatggaagatggcaagcacggattggacgagttgcagggaacaaggatctttacttgggcaccttcagcacccaggaggaggcagcggaggcgtacgacatcgcggcgatcaagttccgcggcctcaacgccgtcaccaacttcgacatgagccgctacgacgtgaagagcatcctggacagcagcgccctccccatcggcagcgccgccaagcgcctcaaggaggccgaggccgcagcgtccgcgcagcaccaccacgccggcgtggtgagctacgacgtcggccgcatcgcctcgcagctcggcgacggcggagccctggcggcggcgtacggcgcgcactaccacggcgccgcctggccgaccatcgcgttccagccgggcgccgccagcacaggcctgtaccacccgtacgcgcagcagccaatgcgcggcggcgggtggtgcaagcaggagcaggaccacgcggtgatcgcggccgcgcacagcctgcaggacctccaccacctgaacctgggcgcggccggcgcgcacgactttttctcggcagggcagcaggccgccgccgctgcgatgcacggcctgggtagcatcgacagtgcgtcgctcgagcacagcaccggctccaactccgtcgtctacaacggcggggtcggcgacagcaacggcgccagcgccgtcggcggcagtggcggtggctacatgatgccgatgagcgctgccggagcaaccactacatcggcaatggtgagccacgagcaggtgcatgcacgggcctacgacgaagccaagcaggctgctcagatggggtacgagagctacctggtgaacgcggagaacaatggtggcggaaggatgtctgcatgggggactgtcgtgtctgcagccgcggcggcagcagcaagcagcaacgacaacatggccgccgacgtcgggcatggcggcgcgcagctcttcagtgtctggaacgacacttaagcgtacgtgccggcctggctctccgaaagggcgtattccagcacactggcggccgttactagacccaacctagacttgtccatcttctggattggccaacttaattaatgtatgaaataaaaggatgcacacatagtgacatgctaatcactataatgtgggcatcaaagttgtgtgttatgtgtaattactagttatctgaataaaagagaaagagatcatccatatttcttatcctaaatgaatgtcacgtgtctttataattctttgatgaaccagatgcatttcattaaccaaatccatatacatataaatattaatcatatataattaatatcaattgggttagcaaaacaaatctagtctaggtgtgttttgcgaatgcggcctccgggcacccagctttcttgtacaaagtggccgttaacggatcggccagatccctatagtattttaaaattgcattaacaaacatgtcctaattggtactcctgagatactataccctcctgttttaaaatagttggcattatcgaattatcattttactctttaatgttttctcttcttttaatatattttatgaattttaatgtattttaaaatgttatgcagttcgctctggacttttctgctgcgcctacacttgggtgtactgggcctaaattcagcctgaccgaccgcctgcattgaataatggatgagcaccggtaaaatccgcgtacccaactttcgagaagaaccgagacgtggcgggccgggccaccgacgcacggcaccagcgactgcacacgtcccgccggcgtacgtgtacgtgctgttccctcactggccgcccaatccactcatgcatgcccacgtacacccctgccgtggcgcgcccagatcctaatcctttcgccgttctgcacttctgctgcctataaatggcggcatcgaccgtcacctgcttcaccaccggcgagccacatcgagaacacgatcgagcacacaagcacgaagactcgtttaggagaaaccacaaaccaccaagccgtgcaagcaccaagcttggtcacccggtccgggcctagaaggccagcttcaagtttgtacaaaaaagcaggcttcgaaggagatagaaccgatccaccatgtccaacctgctcacggttcaccagaaccttccggctcttccagtggacgcgacgtccgatgaagtcaggaagaacctcatggacatgttccgcgacaggcaagcgttcagcgagcacacctggaagatgctgctctccgtctgccgctcctgggctgcatggtgcaagctgaacaacaggaagtggttccccgctgagcccgaggacgtgagggattaccttctgtacctgcaagcgcgaggtttgtttctgcttctacctttgatatatatataataattatcattaattagtagtaatataatatttcaaatatttttttcaaaataaaagaatgtagtatatagcaattgcttttctgtagtttataagtgtgtatattttaatttataacttttctaatatatgaccaaaacatggtgatgcctaggtctggcagtgaagaccatccagcaacaccttggacaactgaacatgcttcacaggcgctccggcctcccgcgccccagcgactcgaacgccgtgagcctcgtcatgcgccgcatcaggaaggaaaacgtcgatgccggcgaaagggcaaagcaggccctcgcgttcgagaggaccgatttcgaccaggtccgcagcctgatggagaacagcgacaggtgccaggacattaggaacctggcgttcctcggaattgcatacaacacgctcctcaggatcgcggaaattgcccgcattcgcgtgaaggacattagccgcaccgacggcggcaggatgcttatccacattggcaggaccaagacgctcgtttccaccgcaggcgtcgaaaaggccctcagcctcggagtgaccaagctcgtcgaacgctggatctccgtgtccggcgtcgcggacgacccaaacaactacctcttctgccgcgtccgcaagaacggggtggctgcccctagcgccaccagccaactcagcacgagggccttggaaggtattttcgaggccacccaccgcctgatctacggcgcgaaggatgacagcggtcaacgctacctcgcatggtccgggcactccgcccgcgttggagctgctagggacatggcccgcgccggtgtttccatccccgaaatcatgcaggcgggtggatggacgaacgtgaacattgtcatgaactacattcgcaaccttgacagcgagacgggcgcaatggttcgcctcctggaagatggtgactgagctagacccagctttcttgtacaaagtggccgttaacggatccagacttgtccatcttctggattggccaacttaattaatgtatgaaataaaaggatgcacacatagtgacatgctaatcactataatgtgggcatcaaagttgtgtgttatgtgtaattactagttatctgaataaaagagaaagagatcatccatatttcttatcctaaatgaatgtcacgtgtctttataattctttgatgaaccagatgcatttcattaaccaaatccatatacatataaatattaatcatatataattaatatcaattgggttagcaaaacaaatctagtctaggtgtgttttgcgaatgcggccgccaccgcggtggagctcgaattccggtccgggcctagaaggccagcttcggccgccccgggcaactttattatacaaagttgatagataaatcagatatctggttcctaaggacccggcggaccgattaaactgattcggtccgacgcgttacctaataacttcgtatagcatacattatacgaagttattagctaactaactagtaagcttggtcacccggtccgtcaatattcgtgcagcgtgacccggtcgtgcccctctctagagataatgagcattgcatgtctaagttataaaaaattaccacatattttttttgtcacacttgtttgaagtgcagtttatctatctttatacatatatttaaactttactctacgaataatataatctatagtactacaataatatcagtgttttagagaatcatataaatgaacagttagacatggtctaaaggacaattgagtattttgacaacaggactctacagttttatctttttagtgtgcatgtgttctcctttttttttgcaaatagcttcacctatataatacttcatccattttattagtacatccatttagggtttagggttaatggtttttatagactaatttttttagtacatctattttattctattttagcctctaaattaagaaaactaaaactctattttagtttttttatttaataatttagatataaaatagaataaaataaagtgactaaaaattaaacaaataccctttaagaaattaaaaaaactaaggaaacatttttcttgtttcgagtagataatgccagcctgttaaacgccgtcgacgagtctaacggacaccaaccagcgaaccagcagcgtcgcgtcgggccaagcgaagcagacggcacggcatctctgtcgctgcctctggacccctctcgagagttccgctccaccgttggacttgctccgctgtcggcatccagaaattgcgtggcggagcggcagacgtgagccggcacggcaggcggcctcctcctcctctcacggcaccggcagctacgggggattcctttcccaccgctccttcgctttcccttcctcgcccgccgtaataaatagacaccccctccacaccctctttccccaacctcgtgttgttcggagcgcacacacacacaaccagatctcccccaaatccacccgtcggcacctccgcttcaaggtacgccgctcgtcctcccccccccccctctctaccttctctagatcggcgttccggtccatgcatggttagggcccggtagttctacttctgttcatgtttgtgttagatccgtgtttgtgttagatccgtgctgctagcgttcgtacacggatgcgacctgtacgtcagacacgttctgattgctaacttgccagtgtttctctttggggaatcctgggatggctctagccgttccgcagacgggatcgatttcatgattttttttgtttcgttgcatagggtttggtttgcccttttcctttatttcaatatatgccgtgcacttgtttgtcgggtcatcttttcatgcttttttttgtcttggttgtgatgatgtggtctggttgggcggtcgttctagatcggagtagaattctgtttcaaactacctggtggatttattaattttggatctgtatgtgtgtgccatacatattcatagttacgaattgaagatgatggatggaaatatcgatctaggataggtatacatgttgatgcgggttttactgatgcatatacagagatgctttttgttcgcttggttgtgatgatgtggtgtggttgggcggtcgttcattcgttctagatcggagtagaatactgtttcaaactacctggtgtatttattaattttggaactgtatgtgtgtgtcatacatcttcatagttacgagtttaagatggatggaaatatcgatctaggataggtatacatgttgatgtgggttttactgatgcatatacatgatggcatatgcagcatctattcatatgctctaaccttgagtacctatctattataataaacaagtatgttttataattattttgatcttgatatacttggatgatggcatatgcagcagctatatgtggatttttttagccctgccttcatacgctatttatttgcttggtactgtttcttttgtcgatgctcaccctgttgtttggtgttacttctgcaggtcgactttaacttagcctaggtatccggatccagccatggctgcgaccactctcacgagcgctctcccaggagcctttagcagctctcagagaccttcggctccgttcaacctccagaggagccctagagtcctcagacgcttcaaccgcaagaccggtagacagccacgcggtctcgtgagagctgctaaggctcagatgcagaacctccccgagaagttcgatgaaacacgcctctgggaggcattgcgcggattcggagtctcccctagcagagtgacctacgccccagtcggattcggcgattaccactggaccgtcaccgacgaggacggtagaccctggttcgcaaccgtcagcgacctcgagcacaaggagcactgcggacaaggtgctcaagcagcactgaagggcctcagacaggcgatggacacagcactcgccttgagggacagagacggacttcgcttcgtcgtcgcacctgtggcagcaacagacggaggtggaccagtgcttccactggacgcaagatacgccctgacagtgttcccccacgtcccaggaagaacaggcgagttcggacaacgcctgaccgaagcagaacgcgatcgcctcctcgcattgcttgccgaactccacggacggactccaccagaaacaacccccccagcagacatggaacccccaggacttccaggagtcagagcagctctcgcggaaagcgaaggaccttggtccggaggaccctttgccgaaccagcacggcttctcttgagagaacacgaggcgaccctccacgcgagacttgctgaattcgaggccctggtcgcaagggtcaagggcagaggagcaccactggtcgttacacacggcgaaccgcatccaggcaacctcatcctgggagaagagggctacctgctcgtcgactgggacacagtgggattggctccagctgaacgcgacctcagcttgatcagcgacgatccagcggacctcgcgagatatgccgaactcacaggacggacgccagaccccgatgctcttgcactctacagactgcgctggagcctcctcgatgtggcagagttcgtcgagtggttcagagccgagcaccagagaacccaggacaccgagagcgcatggaagggcttcacagacacactgggccagttggcagctgggggttctgctgcgtagttcgaactggccagctaagcggtaccgttaacgccgtgggtcgtttaagctgccgctgtacctgtgtcgtctggtgccttctggtgtacctgggaggttgtcgtctatcaagtatctgtggttggtgtcatgagtcagtgagtcccaatactgttcgtgtcctgtgtgcattatacccaaaactgttatgggcaaatcatgaataagctagatgttctaacttaaaagtctctgctcaatatggtatttaggttgtttttgttcgtctcctaatatttgcctgggatcaaattttattggctggtgttcatttgacctccttgttcttgctaggctccattttttactctacagccataatatgtttgattgtttggtttgttctttgttgtacacctggttctgtcgagcttagttttcgacactggcttacagctttagatgttgctattttattgggttctgattgctattttattgggttctgattgctagtttttgctgaatccaaaaaccatgttatttatttaagcgatccaggttattattatgatggtggctaagtttttttttttccaagggtaaattttctggattctccagtgtttctgtggcctgtaccgagctcgaattcattccgattaatcgtggcctcttgctcttcaggatgaagagctatgtttaaacgtgcaagcgctactagacaattcagtacattaaaaacgtccgcaatgtgttattaagttgtctaagcgtcaatttgtttacaccacaatatatcctgccaccagccagccaacagctccccgaccggcagctcggcacaaaatcaccactcgatacaggcagcccatcagtccgggacggcgtcagcgggagagccgttgtaaggcggcagactttgctcatgttaccgatgctattcggaagaacggcaactaagctgccgggtttgaaacacggatgatctcgcggagggtagcatgttgattgtaacgatgacagagcgttgctgcctgtgatcaaatatcatctccctcgcagagatccgaattatcagccttcttattcatttctcgcttaaccgtgacaggctgtcgatcttgagaactatgccgacataataggaaatcgctggataaagccgctgaggaagctgagtggcgctatttctttagaagtgaacgttgacgatcgtcgggcccaggtagaatccgcctgagtcgcaagggtgacttcgcctatattggacgacggcgcgcagagggcgacctctttttgggttacgattgtaggattatcactaaaacaatacatgaacatattcaaatggcaatctctctaaggcattggaaataaatacaaataacagttgggtggagtttttcgacctgtgggcgttaaccttctgttaacctaaaagctcttgcccaaacagcagaatcggcgctaattgccagcggcggaacttttccagtttcgcgaaaaatatcgccactggcaaggaatgggtttgagatggcgaagtctgtcctaaaagcagcgcctgtagttgtagggttgacggccttgatggagcgtcatgccgatgccctctcgagccaacttcaagcacatcatcttaaggttttcccgccgcattccgagaagggcattcgaacattcgggccatcggaggcgtccaagctgctcggcgttggcgagtcatatttacggcagaccgcgtctgagatgccagagttgaatgttagcatgagcccgggtggcaggcgaatgttctcaattgaagatatccatgcgattcggaagtatatggatcaggtcggccgcgggaaccggcgctacctgccacatcgtcgaggcggcgagcagcttcaggttatctctgtgatgaatttcaaaggtgggtcgggtaagaccaccaccgccgcgcatctggcgcagtacctcgctatgcgcggatatcgagtcttggccattgatctcgatcctcaagcgagcctttctgcactctttgggagccaaccggagacggacgttggcccgaacgaaacgctctacggcgctataaggtatgatgatgagcaggtggcaatcgaacgagtcgtccgagggacttacattcccgacctccacctgattcctggtaatcttgagctgatggagtttgaacacgatacgccacgcgcgctgatgaaccgcaaagagggcgacacgctcttttatggtcgcatcagccaagtaattgaagatatcgcggataactatgacgtcgtggtcatcgactgccctccccagcttgggtatctcacgctatccgcattgactgcggcgacgtccattcttgtcacggtccatccgcagatgctggatgtgatgtcgatgaaccagtttctggcaatgacatcgaaccttttgcgtgaaatcgagaatgctggcgccaagttcaagtttaattggatgcgctatctgataacccgtttcgaaccgagcgacggaccacagaaccaaatggtaggttatctgcggtcgatttttggcgaaaatgtcctcaattttccgatgcttaaaaccaccgcggtttcggacgctggcctgacaaaccagactctattcgaagtggagcgtggcctgttcacgcgctcgacctatgatcgagccttggaggcgatgaacgccgtcaacgacgagatcgaaacactgatcaaaaaagcatggggtaggcccacatgagccggaagcacatccttggcgtctcaactgacgcccctgagacgtcgcccgccgacaataggacggcaaagaaccgctccatgccgctcctcggcgtaacaaggaaggagcgcgatccggcaacgaagctcacagcgaacattggtaacgcactgcgagagcaaaacgatcgtcttagccgtgccgaagagatcgagcggcgtctcgctgaaggtcaggcagtgatagagttggatgcctcgtcaatagaaccgtctttcgtgcaggatcgtatgcgaggggacattgacgggctccttacttcgatccgggaacaaggacagcaagtcccaatccttgtgcgaccgcatccgagccagccgggccgatatcaggttgccttcggccaccgccggctacgcgccgtttcagaactcggacttccggtcagagcggtcgttcgcgaactgacggacgagcaagtggtcgtagcacagggtcaggaaaacaatgagcgcgaagatcttaccttcatcgaaaaggcgcgcttcgcacatcgcctgaacaggcagttttctcgagagattgtcatcgccgcgatgtcgatcgacaagagcaatttgtccaagatgcttctgctcgttgacgccctcccctctgaactgaccgatgctattggtgccgctcctggtgttggacggccgagttggcaacaacttgccgagctgattgagaaagtttcttcaccggccgacgtggctaaatatgctatgtcggaggaagttcaagcgctgccatcggcagaacgattcaaggcggtgatcgctagtctgaagcccagtcgggttgcgcgtggacttcccgaggtcatggccaccccagacggcaccagaattgcacaggtgacgcagagcaaggccaaactggaaatcacgattgacaggaaggcgacgcccgattttgcgaccttcgtgctcgatcatgtgccagcgctgtatcaagcgtaccacgctgagaaccaacggaaacggggagagtaaaccgcaaaagaaaagagccccctcaacgtcgccgtcgcggaagcccttctgtctctctagcgcgaacagaatcgcatttcctcgaatcctcgtcaagagtttttagcgccgttttggtgagctgatttcctttgcctgctgaaaggtgaaagatgatgcagacaggaagtgtaacgacgccattcgggcggcggccaatgacgcttgcgcttgtgcggcgccagacggcgctggcccatatcaaacaaggcaagacagcggacaagtggaaggtctttagagacgcgtccgcggctatggaactacttggaatccagtccaacagtcttgccgtccttgatgcgctattgagctttcacccggaaacggagttgcgtcaggaggcacagctgatcgtcttcccgtcgaatgctcagcttgcccttcgggcgcatgggatggctggcgcgactttgcgtaggcacatcgccatgctcgtggagtcaggcttgatcgtccggaaggatagcgccaacggaaagcgttacgctcgtaaggatggcgctggtcagatcgagcgcgcgtttggcttcgatttgtctccgcttctcgcgcggtcggaagagctagcgatgatggcacagcaggtgatggccgatcgagcagcattcaggatggccaaagaaagtctgacgatttgccgacgggacgttcggaagctaattacggcagctatggaagagggagcggagggcgactggcaagctgtcgaggaagtctatgtggaacttgtgggtagaattccacgcgccccgacgcttgctgatgtagagtcaattctcgaagagatgtggatgctccaggaagagataatcaaccggttggaaattagagacaattcagaaaataatagcaccaatgctgcccagagcgagcagcacatacagaattcaaaacccgaatccgttaatgaacttgaacctcgctctgaaaaggagcagggcgctaagccgagtgaaatagaccgggcaaggagcgagccgataaaagcgttccccctcgggatgatcctgaaagcatgcccgaccattggcaactatgggccgagcggtgcggttgctagctggcgtgacctcatgtcggctgcggtggtggttcggtctatgctgggggtcagcccgtcggcttaccaagacgcgtgtgaggcaatgggaccggagaatgcggcagcagcgatggcgtgcattttggagcgagcgaacttcatcaattcgcccgggggctatctccgagatctgacacggcggagcgagcttgggaagttttcacttggcccgatgataatggcgctcttgaaggctagcgggcaggggacgttgcggtttggctagaattagcgagtatggagcaggatggtctgtggtcagctgaccacagacctaataggttgaaaacatgagcgttttttggatgatcgacagaccatccgattcccggagtaccaagcgtgctctgatgggagcgataacattactcaacaagcacgaaggccccatgccgatcgttgatcgtgaaggagagcctgctctacatgcggcggtattttgccggccgaggcatgtagtcgcggagcactgcctatttactgccctaggcacaaacgttgactcttggatcgagctggcagacaaagcaataacccacacagaggacgattaatggctgacgaagagatccagaatccgccggacggtactgctgctgccgaagttgagccggctgctcctagaggtagaagagcaaagaaagcaccagccgaaacagcccgcacgggatcgttcaaatccgtgaagccgaaaacccgcggcctcagcaaccgagaaaaactggagaagatcggtcaaatcgaagctcaggtcgctggcggcgcaaccttgaaggacgccgttaagatcgtgggtatttccgttcagacctattatcaatggaagagagctgcggttcaacctgtctcacagaatccggccgtgtctgtttcagttgacgatgaactcggcgagttcatccaactcgaggaggaaaatatgcatggcatgcccgttccatacagaagctgggcgaacaaacgatgctcgccttccagaaaaccgaggatgcgaaccacttcatccggggtcagcaccaccggcaagcgccgcgacggccgaggtcttccgatctcctgaagccagggcagatccgtgcacagcaccttgccgtagaagaacagcaaggccgccaatgcctgacgatgcgtggagaccgaaaccttgcgctcgttcgccagccaggacagaaatgcctcgacttcgctgctgcccaaggttgccgggtgacgcacaccgtggaaacggatgaaggcacgaacccagtggacataagcctgttcggttcgtaagctgtaatgcaagtagcgtatgcgctcacgcaactggtccagaaccttgaccgaacgcagcggtggtaacggcgcagtggcggttttcatggcttgttatgactgtttttttggggtacagtctatgcctcgggcatccaagcagcaagcgcgttacgccgtgggtcgatgtttgatgttatggagcagcaacgatgttacgcagcagggcagtcgccctaaaacaaagttaaacatcatgagggaagcggtgatcgccgaagtatcgactcaactatcagaggtagttggcgtcatcgagcgccatctcgaaccgacgttgctggccgtacatttgtacggctccgcagtggatggcggcctgaagccacacagtgatattgatttgctggttacggtgacggtaaggcttgatgaaacaacgcggcgagctttgatcaacgaccttttggaaacttcggcttcccctggagagagcgagattctccgcgctgtagaagtcaccattgttgtgcacgacgacatcattccgtggcgttatccagctaagcgcgaactgcaatttggagaatggcagcgcaatgacattcttgcaggtatcttcgagccagccacgatcgacattgatctggctatcttgctgacaaaagcaagagaacatagcgttgccttggtaggtccagcggcggaggaactctttgatccggttcctgaacaggatctatttgaggcgctaaatgaaaccttaacgctatggaactcgccgcccgactgggctggcgatgagcgaaatgtagtgcttacgttgtcccgcatttggtacagcgcagtaaccggcaaaatcgcgccgaaggatgtcgctgccgactgggcaatggagcgcctgccggcccagtatcagcccgtcatacttgaagctagacaggcttatcttggacaagaagaagatcgcttggcctcgcgcgcagatcagttggaagaatttgtccactacgtgaaaggcgagatcaccaaggtagtcggcaaataatgtctaacaattcgttcaagccgacgccgcttcgcggcgcggcttaactcaagcgttagatgcactatactaaccaactagtgcgctcttccgcttcctcgctcactgactcgctgcgctcggtcgttcggctgcggcgagcggtatcagctcactcaaaggcggtaatacggttatccacagaatcaggggataacgcaggaaagaacatgtgagcaaaaggccagcaaaaggccaggaaccgtaaaaaggccgcgttgctggcgtttttccataggctccgcccccctgacgagcatcacaaaaatcgacgctcaagtcagaggtggcgaaacccgacaggactataaagataccaggcgtttccccctggaagctccctcgtgcgctctcctgttccgaccctgccgcttaccggatacctgtccgcctttctcccttcgggaagcgtggcgctttctcatagctcacgctgtaggtatctcagttcggtgtaggtcgttcgctccaagctgggctgtgtgcacgaaccccccgttcagcccgaccgctgcgccttatccggtaactatcgtcttgagtccaacccggtaagacacgacttatcgccactggcagcagccactggtaacaggattagcagagcgaggtatgtaggcggtgctacagagttcttgaagtggtggcctaactacggctacactagaagaacagtatttggtatctgcgctctgctgaagccagttaccttcggaaaaagagttggtagctcttgatccggcaaacaaaccaccgctggtagcggtggtttttttgtttgcaagcagcagattacgcgcagaaaaaaaggatctcaagaagatcctttgatcttttctacggggtctgacgctcagtggaacgaaaactcacgttaagggattttggtcatgagattatcaaaaaggatcttcacctagatccttttaaattaaaaatgaagcgtaccgacgatcttgctgcgttcggatattttcgtggagttcccgccacagacccggattgaaggcgagatccagcaactcgcgccagatcatcctgtgacggaactttggcgcgtgatgactggccaggacgtcggccgaaagagcgacaagcagatcacgcttttcgacagcgtcggatttgcgatcgaggatttttcggcgctgcgctacgtccgcgaccgcgttgagggatcaagccacagcagcccactcgaccttctagccgacccagacgagccaag

SEQ ID NO: 34 - DNA, 19079 bp, Artificial Sequence
  Synthetic construct comprising the T-DNA (RB to LB): RB+LoxP-NOS:WUS:PINII+ZMUBI:ODP2:PINII+RAB17:MOCRE:PINII+LB
ggatctttttggaatgctgctccgtcgtcaggctttccgacgtttgggtggttgaacagaagtcattatcgcacggaatgccaagcactcccgaggggaaccctgtggttggcatgcacatacaaatggacgaacggataaaccttttcacgcccttttaaatatccgattattctaataaacgctcttttctcttaggtttacccgccaatatatcctgtcaaacactgcggccgcacttgaccgcggatggagccggagctgtggtgaggccatcgacgggaggtgggggagaacacagtctcagtgttctttgtgagtccgcaaggtttttagcttttctgtattaattaaggttgctgttggctgtagaatacggtcgtggaagagctgtatcggtagctactacgtaagctattatatactggaagtctggagctcgtcgatctccggtcgtcttcctccatttctcctcgtcttgctttgactgctgctaccatttgcttctgttttctgatgaagcatgccatgtcggccaccagtgtttgtgtggtttttgcagggaatggctttcaagtgctgtgattgaatggccctcgtcgtcctcggctgagctcacatggacgcgtcatgtgagtgagatatatgatcatatgatgagtggggttcgggtgagtgcgtacttgaagtaggatcccgctttcactcattcattcattggcctttaaaccgggaaattttcgcgaggagatggagggaagcaagcagggtgacgagtgcagagtgccgcgagcgctttgtcaaaaggcaccgccgtaggcaaaaaaatcaatggccctgactgactcgatggtagtactactgtagagactagagagggttgctccccatatcttcgtgtgacttttactccagcattgcatttccgtcattgagacgttaattaatagcagctttcgggacagatgactgtggccatgtttcgtcacggccgcttcgtgccagctgggggtactatagtactgtgattttgttagtaaaaactttcattaggccaccattgacgaccgggccttcgcttttgctgcgctaattaaccatttcccggcgaccgaagggaacatgaacatgccccgacacatgagggcatgaggactagtgttctccctgtcgttcgttgacttgactagtgatagtttaaacgctcttcaactggaagagcggttactaccggttcactagctagctgctaatcgagctagttaccctatgaggtgacatgaagcgctcacggttactatgacggttagcttcacgactgttggtggcagtagcgtacgacttagctatagttccggacttacccttaagataacttcgtatagcatacattatacgaagttatgggcccacgcgtgaagagcggttaccagagctggtcacctttgtccaccaagatggaactgtcttcggccagaatggccatctggattcagcaggcctagaaggccatttatcgctatcaactttgtatagaaaagttgggccgaattcgagctcggtacggccagaatccggtaagtgactagggtcacgtgaccctagtcacttaaattcggccagaatggccatctggattcagcaggcgaggccggccacactgatagtttaaactgaaggcgggaaacgacaatctgatcatgagcggagaattaagggagtcacgttatgacccccgccgatgacgcgggacaagccgttttacgtttggaactgacagaaccgcaacgattgaaggagccactcagccgcgggtttctggagtttaatgagctaagcacatacgtcagaaaccattattgcgcgttcaaaagtcgcctaaggtcactatcagctagcaaatatttcttgtcaaaaatgctccactgacgttccataaattcccctcggtatccaattagagtctcatattcactctcccggcggatctcgactctagaggatcgctcaggaaggccgctgagatagagccatggcggccaatgcgggcggcggtggagcgggaggaggcagcggcagcggcagcgtggctgcgccggcggtgtgccgccccagcggctcgcggtggacgccgacgccggagcagatcaggatgctgaaggagctctactacggctgcggcatccggtcgcccagctcggagcagatccagcgcatcaccgccatgctgcggcagcacggcaagatcgagggcaagaacgtcttctactggttccagaaccacaaggcccgcgagcgccagaagcgccgcctcaccagcctcgacgtcaacgtgcccgccgccggcgcggccgacgccaccaccagccaactcggcgtcctctcgctgtcgtcgccgccgccttcaggcgcggcgcctccctcgcccaccctcggcttctacgccgccggcaatggcggcggatcggctgtgctgctggacacgagttccgactggggcagcagcggcgctgctatggccaccgagacatgcttcctgcaggactacatgggcgtgacggacacgggcagctcgtcgcagtggccacgcttctcgtcgtcggacacgataatggcggcggccgcggcgcgggcggcgacgacgcgggcgcccgagacgctccctctcttcccgacctgcggcgacgacggcggcagcggtagcagcagctacttgccgttctggggtgccgcgtccacaactgccggcgccacttcttccgttgcgatccaacagcaacaccagctgcaggagcagtacagcttttacagcaacagcaacagcacccagctggccggcaccggcaaccaagacgtatcggcaacagcagcagcagccgccgccctggagctgagcctcagctcatggtgctccccttaccctgctgcagggagtatgtgagagcaacgcgagctgccactgctcttcactgatgtctctggaatggaaggaggaggaagtgagcatagcgttggtgcgttgctgtcaagggcgaattgtaccacatggttaacctagacttgtccatcttctggattggccaacttaattaatgtatgaaataaaaggatgcacacatagtgacatgctaatcactataatgtgggcatcaaagttgtgtgttatgtgtaattactagttatctgaataaaagagaaagagatcatccatatttcttatcctaaatgaatgtcacgtgtctttataattctttgatgaaccagatgcatttcattaaccaaatccatatacatataaatattaatcatatataattaatatcaattgggttagcaaaacaaatctagtctaggtgtgttttgcgaatgcggccgccaccgcggtggagctcgaattccggtccgggttaccagagctggtcacctaagtgactagggtcacgtgaccctagtcacttattcccagcttcaagtttgtacaaaaaagcaggctccggccagaatggcccggaccgggttaccgaattcgagctcggtaccatttaaattgcgcccgccacggccgtggaggtcgtattccggtcagcttgcatccctgcagtgcagcgtgacccggtcgtgcccctctctagagataatgagcattgcatgtctaagttataaaaaattaccacatattttttttgtcacacttgtttgaagtgcagtttatctatctttatacatatatttaaactttactctacgaataatataatctatagtactacaataatatcagtgttttagagaatcatataaatgaacagttagacatggtctaaaggacaattgagtattttgacaacaggactctacagttttatctttttagtgtgcatgtgttctcctttttttttgcaaatagcttcacctatataatacttcatccattttattagtacatccatttagggtttagggttaatggtttttatagactaatttttttagtacatctattttattctattttagcctctaaattaagaaaactaaaactctattttagtttttttatttaataatttagatataaaatagaataaaataaagtgactaaaaattaaacaaataccctttaagaaattaaaaaaactaaggaaacatttttcttgtttcgagtagataatgccagcctgttaaacgccgtcgacgagtctaacggacaccaaccagcgaaccagcagcgtcgcgtcgggccaagcgaagcagacggcacggcatctctgtcgctgcctctggacccctctcgagagttccgctccaccgttggacttgctccgctgtcggcatccagaaattgcgtggcggagcggcagacgtgagccggcacggcaggcggcctcctcctcctctcacggcaccggcagctacgggggattcctttcccaccgctccttcgctttcccttcctcgcccgccgtaataaatagacaccccctccacaccctctttccccaacctcgtgttgttcggagcgcacacacacacaaccagatctcccccaaatccacccgtcggcacctccgcttcaaggtacgccgctcgtcctcccccccccccctctctaccttctctagatcggcgttccggtccatgcatggttagggcccggtagttctacttctgttcatgtttgtgttagatccgtgtttgtgttagatccgtgctgctagcgttcgtacacggatgcgacctgtacgtcagacacgttctgattgctaacttgccagtgtttctctttggggaatcctgggatggctctagccgttccgcagacgggatcgatttcatgattttttttgtttcgttgcatagggtttggtttgcccttttcctttatttcaatatatgccgtgcacttgtttgtcgggtcatcttttcatgcttttttttgtcttggttgtgatgatgtggtctggttgggcggtcgttctagatcggagtagaattctgtttcaaactacctggtggatttattaattttggatctgtatgtgtgtgccatacatattcatagttacgaattgaagatgatggatggaaatatcgatctaggataggtatacatgttgatgcgggttttactgatgcatatacagagatgctttttgttcgcttggttgtgatgatgtggtgtggttgggcggtcgttcattcgttctagatcggagtagaatactgtttcaaactacctggtgtatttattaattttggaactgtatgtgtgtgtcatacatcttcatagttacgagtttaagatggatggaaatatcgatctaggataggtatacatgttgatgtgggttttactgatgcatatacatgatggcatatgcagcatctattcatatgctctaaccttgagtacctatctattataataaacaagtatgttttataattattttgatcttgatatacttggatgatggcatatgcagcagctatatgtggatttttttagccctgccttcatacgctatttatttgcttggtactgtttcttttgtcgatgctcaccctgttgtttggtgttacttctgcaggtcgactctagaggatccatggccactgtgaacaactggctcgctttctccctctccccgcaggagctgccgccctcccagacgacggactccacactcatctcggccgccaccgccgaccatgtctccggcgatgtctgcttcaacatcccccaagattggagcatgaggggatcagagctttcggcgctcgtcgcggagccgaagctggaggacttcctcggcggcatctccttctccgagcagcatcacaaggccaactgcaacatgatacccagcactagcagcacagtttgctacgcgagctcaggtgctagcaccggctaccatcaccagctgtaccaccagcccaccagctcagcgctccacttcgcggactccgtaatggtggcttcctcggccggtgtccacgacggcggtgccatgctcagcgcggccgccgctaacggtgtcgctggcgctgccagtgccaacggcggcggcatcgggctgtccatgattaagaactggctgcggagccaaccggcgcccatgcagccgagggtggcggcggctgagggcgcgcaggggctctctttgtccatgaacatggcggggacgacccaaggcgctgctggcatgccacttctcgctggagagcgcgcacgggcgcccgagagtgtatcgacgtcagcacagggtggagccgtcgtcgtcacggcgccgaaggaggatagcggtggcagcggtgttgccggcgctctagtagccgtgagcacggacacgggtggcagcggcggcgcgtcggctgacaacacggcaaggaagacggtggacacgttcgggcagcgcacgtcgatttaccgtggcgtgacaaggcatagatggactgggagatatgaggcacatctttgggataacagttgcagaagggaagggcaaactcgtaagggtcgtcaagtctatttaggtggctatgataaagaggagaaagctgctagggcttatgatcttgctgctctgaagtactggggtgccacaacaacaacaaattttccagtgagtaactacgaaaaggagctcgaggacatgaagcacatgacaaggcaggagtttgtagcgtctctgagaaggaagagcagtggtttctccagaggtgcatccatttacaggggagtgactaggcatcaccaacatggaagatggcaagcacggattggacgagttgcagggaacaaggatctttacttgggcaccttcagcacccaggaggaggcagcggaggcgtacgacatcgcggcgatcaagttccgcggcctcaacgccgtcaccaacttcgacatgagccgctacgacgtgaagagcatcctggacagcagcgccctccccatcggcagcgccgccaagcgcctcaaggaggccgaggccgcagcgtccgcgcagcaccaccacgccggcgtggtgagctacgacgtcggccgcatcgcctcgcagctcggcgacggcggagccctggcggcggcgtacggcgcgcactaccacggcgccgcctggccgaccatcgcgttccagccgggcgccgccagcacaggcctgtaccacccgtacgcgcagcagccaatgcgcggcggcgggtggtgcaagcaggagcaggaccacgcggtgatcgcggccgcgcacagcctgcaggacctccaccacctgaacctgggcgcggccggcgcgcacgactttttctcggcagggcagcaggccgccgccgctgcgatgcacggcctgggtagcatcgacagtgcgtcgctcgagcacagcaccggctccaactccgtcgtctacaacggcggggtcggcgacagcaacggcgccagcgccgtcggcggcagtggcggtggctacatgatgccgatgagcgctgccggagcaaccactacatcggcaatggtgagccacgagcaggtgcatgcacgggcctacgacgaagccaagcaggctgctcagatggggtacgagagctacctggtgaacgcggagaacaatggtggcggaaggatgtctgcatgggggactgtcgtgtctgcagccgcggcggcagcagcaagcagcaacgacaacatggccgccgacgtcgggcatggcggcgcgcagctcttcagtgtctggaacgacacttaagcgtacgtgccggcctggctctccgaaagggcgtattccagcacactggcggccgttactagacccaacctagacttgtccatcttctggattggccaacttaattaatgtatgaaataaaaggatgcacacatagtgacatgctaatcactataatgtgggcatcaaagttgtgtgttatgtgtaattactagttatctgaataaaagagaaagagatcatccatatttcttatcctaaatgaatgtcacgtgtctttataattctttgatgaaccagatgcatttcattaaccaaatccatatacatataaatattaatcatatataattaatatcaattgggttagcaaaacaaatctagtctaggtgtgttttgcgaatgcggcctccgggcacccagctttcttgtacaaagtggccgttaacggatcggccagatccctatagtattttaaaattgcattaacaaacatgtcctaattggtactcctgagatactataccctcctgttttaaaatagttggcattatcgaattatcattttactctttaatgttttctcttcttttaatatattttatgaattttaatgtattttaaaatgttatgcagttcgctctggacttttctgctgcgcctacacttgggtgtactgggcctaaattcagcctgaccgaccgcctgcattgaataatggatgagcaccggtaaaatccgcgtacccaactttcgagaagaaccgagacgtggcgggccgggccaccgacgcacggcaccagcgactgcacacgtcccgccggcgtacgtgtacgtgctgttccctcactggccgcccaatccactcatgcatgcccacgtacacccctgccgtggcgcgcccagatcctaatcctttcgccgttctgcacttctgctgcctataaatggcggcatcgaccgtcacctgcttcaccaccggcgagccacatcgagaacacgatcgagcacacaagcacgaagactcgtttaggagaaaccacaaaccaccaagccgtgcaagcaccaagcttggtcacccggtccgggcctagaaggccagcttcaagtttgtacaaaaaagcaggcttcgaaggagatagaaccgatccaccatgtccaacctgctcacggttcaccagaaccttccggctcttccagtggacgcgacgtccgatgaagtcaggaagaacctcatggacatgttccgcgacaggcaagcgttcagcgagcacacctggaagatgctgctctccgtctgccgctcctgggctgcatggtgcaagctgaacaacaggaagtggttccccgctgagcccgaggacgtgagggattaccttctgtacctgcaagcgcgaggtttgtttctgcttctacctttgatatatatataataattatcattaattagtagtaatataatatttcaaatatttttttcaaaataaaagaatgtagtatatagcaattgcttttctgtagtttataagtgtgtatattttaatttataacttttctaatatatgaccaaaacatggtgatgcctaggtctggcagtgaagaccatccagcaacaccttggacaactgaacatgcttcacaggcgctccggcctcccgcgccccagcgactcgaacgccgtgagcctcgtcatgcgccgcatcaggaaggaaaacgtcgatgccggcgaaagggcaaagcaggccctcgcgttcgagaggaccgatttcgaccaggtccgcagcctgatggagaacagcgacaggtgccaggacattaggaacctggcgttcctcggaattgcatacaacacgctcctcaggatcgcggaaattgcccgcattcgcgtgaaggacattagccgcaccgacggcggcaggatgcttatccacattggcaggaccaagacgctcgtttccaccgcaggcgtcgaaaaggccctcagcctcggagtgaccaagctcgtcgaacgctggatctccgtgtccggcgtcgcggacgacccaaacaactacctcttctgccgcgtccgcaagaacggggtggctgcccctagcgccaccagccaactcagcacgagggccttggaaggtattttcgaggccacccaccgcctgatctacggcgcgaaggatgacagcggtcaacgctacctcgcatggtccgggcactccgcccgcgttggagctgctagggacatggcccgcgccggtgtttccatccccgaaatcatgcaggcgggtggatggacgaacgtgaacattgtcatgaactacattcgcaaccttgacagcgagacgggcgcaatggttcgcctcctggaagatggtgactgagctagacccagctttcttgtacaaagtggccgttaacggatccagacttgtccatcttctggattggccaacttaattaatgtatgaaataaaaggatgcacacatagtgacatgctaatcactataatgtgggcatcaaagttgtgtgttatgtgtaattactagttatctgaataaaagagaaagagatcatccatatttcttatcctaaatgaatgtcacgtgtctttataattctttgatgaaccagatgcatttcattaaccaaatccatatacatataaatattaatcatatataattaatatcaattgggttagcaaaacaaatctagtctaggtgtgttttgcgaatgcggccgccaccgcggtggagctcgaattccggtccgggcctagaaggccagcttcggccgccccgggcaactttattatacaaagttgatagataaatcagatatctggttcctaaggacccggcggaccgattaaactgattcggtccgacgcgttacctattcgaactggccagctaagcggtaccgttaacgccgtgggtcgtttaagctgccgctgtacctgtgtcgtctggtgccttctggtgtacctgggaggttgtcgtctatcaagtatctgtggttggtgtcatgagtcagtgagtcccaatactgttcgtgtcctgtgtgcattatacccaaaactgttatgggcaaatcatgaataagctagatgttctaacttaaaagtctctgctcaatatggtatttaggttgtttttgttcgtctcctaatatttgcctgggatcaaattttattggctggtgttcatttgacctccttgttcttgctaggctccattttttactctacagccataatatgtttgattgtttggtttgttctttgttgtacacctggttctgtcgagcttagttttcgacactggcttacagctttagatgttgctattttattgggttctgattgctattttattgggttctgattgctagtttttgctgaatccaaaaaccatgttatttatttaagcgatccaggttattattatgatggtggctaagtttttttttttccaagggtaaattttctggattctccagtgtttctgtggcctgtaccgagctcgaattcattccgattaatcgtggcctcttgctcttcaggatgaagagctatgtttaaacgtgcaagcgctactagacaattcagtacattaaaaacgtccgcaatgtgttattaagttgtctaagcgtcaatttgtttacaccacaatatatcctgccaccagccagccaacagctccccgaccggcagctcggcacaaaatcaccactcgatacaggcagcccatcagtccgggacggcgtcagcgggagagccgttgtaaggcggcagactttgctcatgttaccgatgctattcggaagaacggcaactaagctgccgggtttgaaacacggatgatctcgcggagggtagcatgttgattgtaacgatgacagagcgttgctgcctgtgatcaaatatcatctccctcgcagagatccgaattatcagccttcttattcatttctcgcttaaccgtgacaggctgtcgatcttgagaactatgccgacataataggaaatcgctggataaagccgctgaggaagctgagtggcgctatttctttagaagtgaacgttgacgatcgtcgggcccaggtagaatccgcctgagtcgcaagggtgacttcgcctatattggacgacggcgcgcagagggcgacctctttttgggttacgattgtaggattatcactaaaacaatacatgaacatattcaaatggcaatctctctaaggcattggaaataaatacaaataacagttgggtggagtttttcgacctgtgggcgttaaccttctgttaacctaaaagctcttgcccaaacagcagaatcggcgctaattgccagcggcggaacttttccagtttcgcgaaaaatatcgccactggcaaggaatgggtttgagatggcgaagtctgtcctaaaagcagcgcctgtagttgtagggttgacggccttgatggagcgtcatgccgatgccctctcgagccaacttcaagcacatcatcttaaggttttcccgccgcattccgagaagggcattcgaacattcgggccatcggaggcgtccaagctgctcggcgttggcgagtcatatttacggcagaccgcgtctgagatgccagagttgaatgttagcatgagcccgggtggcaggcgaatgttctcaattgaagatatccatgcgattcggaagtatatggatcaggtcggccgcgggaaccggcgctacctgccacatcgtcgaggcggcgagcagcttcaggttatctctgtgatgaatttcaaaggtgggtcgggtaagaccaccaccgccgcgcatctggcgcagtacctcgctatgcgcggatatcgagtcttggccattgatctcgatcctcaagcgagcctttctgcactctttgggagccaaccggagacggacgttggcccgaacgaaacgctctacggcgctataaggtatgatgatgagcaggtggcaatcgaacgagtcgtccgagggacttacattcccgacctccacctgattcctggtaatcttgagctgatggagtttgaacacgatacgccacgcgcgctgatgaaccgcaaagagggcgacacgctcttttatggtcgcatcagccaagtaattgaagatatcgcggataactatgacgtcgtggtcatcgactgccctccccagcttgggtatctcacgctatccgcattgactgcggcgacgtccattcttgtcacggtccatccgcagatgctggatgtgatgtcgatgaaccagtttctggcaatgacatcgaaccttttgcgtgaaatcgagaatgctggcgccaagttcaagtttaattggatgcgctatctgataacccgtttcgaaccgagcgacggaccacagaaccaaatggtaggttatctgcggtcgatttttggcgaaaatgtcctcaattttccgatgcttaaaaccaccgcggtttcggacgctggcctgacaaaccagactctattcgaagtggagcgtggcctgttcacgcgctcgacctatgatcgagccttggaggcgatgaacgccgtcaacgacgagatcgaaacactgatcaaaaaagcatggggtaggcccacatgagccggaagcacatccttggcgtctcaactgacgcccctgagacgtcgcccgccgacaataggacggcaaagaaccgctccatgccgctcctcggcgtaacaaggaaggagcgcgatccggcaacgaagctcacagcgaacattggtaacgcactgcgagagcaaaacgatcgtcttagccgtgccgaagagatcgagcggcgtctcgctgaaggtcaggcagtgatagagttggatgcctcgtcaatagaaccgtctttcgtgcaggatcgtatgcgaggggacattgacgggctccttacttcgatccgggaacaaggacagcaagtcccaatccttgtgcgaccgcatccgagccagccgggccgatatcaggttgccttcggccaccgccggctacgcgccgtttcagaactcggacttccggtcagagcggtcgttcgcgaactgacggacgagcaagtggtcgtagcacagggtcaggaaaacaatgagcgcgaagatcttaccttcatcgaaaaggcgcgcttcgcacatcgcctgaacaggcagttttctcgagagattgtcatcgccgcgatgtcgatcgacaagagcaatttgtccaagatgcttctgctcgttgacgccctcccctctgaactgaccgatgctattggtgccgctcctggtgttggacggccgagttggcaacaacttgccgagctgattgagaaagtttcttcaccggccgacgtggctaaatatgctatgtcggaggaagttcaagcgctgccatcggcagaacgattcaaggcggtgatcgctagtctgaagcccagtcgggttgcgcgtggacttcccgaggtcatggccaccccagacggcaccagaattgcacaggtgacgcagagcaaggccaaactggaaatcacgattgacaggaaggcgacgcccgattttgcgaccttcgtgctcgatcatgtgccagcgctgtatcaagcgtaccacgctgagaaccaacggaaacggggagagtaaaccgcaaaagaaaagagccccctcaacgtcgccgtcgcggaagcccttctgtctctctagcgcgaacagaatcgcatttcctcgaatcctcgtcaagagtttttagcgccgttttggtgagctgatttcctttgcctgctgaaaggtgaaagatgatgcagacaggaagtgtaacgacgccattcgggcggcggccaatgacgcttgcgcttgtgcggcgccagacggcgctggcccatatcaaacaaggcaagacagcggacaagtggaaggtctttagagacgcgtccgcggctatggaactacttggaatccagtccaacagtcttgccgtccttgatgcgctattgagctttcacccggaaacggagttgcgtcaggaggcacagctgatcgtcttcccgtcgaatgctcagcttgcccttcgggcgcatgggatggctggcgcgactttgcgtaggcacatcgccatgctcgtggagtcaggcttgatcgtccggaaggatagcgccaacggaaagcgttacgctcgtaaggatggcgctggtcagatcgagcgcgcgtttggcttcgatttgtctccgcttctcgcgcggtcggaagagctagcgatgatggcacagcaggtgatggccgatcgagcagcattcaggatggccaaagaaagtctgacgatttgccgacgggacgttcggaagctaattacggcagctatggaagagggagcggagggcgactggcaagctgtcgaggaagtctatgtggaacttgtgggtagaattccacgcgccccgacgcttgctgatgtagagtcaattctcgaagagatgtggatgctccaggaagagataatcaaccggttggaaattagagacaattcagaaaataatagcaccaatgctgcccagagcgagcagcacatacagaattcaaaacccgaatccgttaatgaacttgaacctcgctctgaaaaggagcagggcgctaagccgagtgaaatagaccgggcaaggagcgagccgataaaagcgttccccctcgggatgatcctgaaagcatgcccgaccattggcaactatgggccgagcggtgcggttgctagctggcgtgacctcatgtcggctgcggtggtggttcggtctatgctgggggtcagcccgtcggcttaccaagacgcgtgtgaggcaatgggaccggagaatgcggcagcagcgatggcgtgcattttggagcgagcgaacttcatcaattcgcccgggggctatctccgagatctgacacggcggagcgagcttgggaagttttcacttggcccgatgataatggcgctcttgaaggctagcgggcaggggacgttgcggtttggctagaattagcgagtatggagcaggatggtctgtggtcagctgaccacagacctaataggttgaaaacatgagcgttttttggatgatcgacagaccatccgattcccggagtaccaagcgtgctctgatgggagcgataacattactcaacaagcacgaaggccccatgccgatcgttgatcgtgaaggagagcctgctctacatgcggcggtattttgccggccgaggcatgtagtcgcggagcactgcctatttactgccctaggcacaaacgttgactcttggatcgagctggcagacaaagcaataacccacacagaggacgattaatggctgacgaagagatccagaatccgccggacggtactgctgctgccgaagttgagccggctgctcctagaggtagaagagcaaagaaagcaccagccgaaacagcccgcacgggatcgttcaaatccgtgaagccgaaaacccgcggcctcagcaaccgagaaaaactggagaagatcggtcaaatcgaagctcaggtcgctggcggcgcaaccttgaaggacgccgttaagatcgtgggtatttccgttcagacctattatcaatggaagagagctgcggttcaacctgtctcacagaatccggccgtgtctgtttcagttgacgatgaactcggcgagttcatccaactcgaggaggaaaatatgcatggcatgcccgttccatacagaagctgggcgaacaaacgatgctcgccttccagaaaaccgaggatgcgaaccacttcatccggggtcagcaccaccggcaagcgccgcgacggccgaggtcttccgatctcctgaagccagggcagatccgtgcacagcaccttgccgtagaagaacagcaaggccgccaatgcctgacgatgcgtggagaccgaaaccttgcgctcgttcgccagccaggacagaaatgcctcgacttcgctgctgcccaaggttgccgggtgacgcacaccgtggaaacggatgaaggcacgaacccagtggacataagcctgttcggttcgtaagctgtaatgcaagtagcgtatgcgctcacgcaactggtccagaaccttgaccgaacgcagcggtggtaacggcgcagtggcggttttcatggcttgttatgactgtttttttggggtacagtctatgcctcgggcatccaagcagcaagcgcgttacgccgtgggtcgatgtttgatgttatggagcagcaacgatgttacgcagcagggcagtcgccctaaaacaaagttaaacatcatgagggaagcggtgatcgccgaagtatcgactcaactatcagaggtagttggcgtcatcgagcgccatctcgaaccgacgttgctggccgtacatttgtacggctccgcagtggatggcggcctgaagccacacagtgatattgatttgctggttacggtgacggtaaggcttgatgaaacaacgcggcgagctttgatcaacgaccttttggaaacttcggcttcccctggagagagcgagattctccgcgctgtagaagtcaccattgttgtgcacgacgacatcattccgtggcgttatccagctaagcgcgaactgcaatttggagaatggcagcgcaatgacattcttgcaggtatcttcgagccagccacgatcgacattgatctggctatcttgctgacaaaagcaagagaacatagcgttgccttggtaggtccagcggcggaggaactctttgatccggttcctgaacaggatctatttgaggcgctaaatgaaaccttaacgctatggaactcgccgcccgactgggctggcgatgagcgaaatgtagtgcttacgttgtcccgcatttggtacagcgcagtaaccggcaaaatcgcgccgaaggatgtcgctgccgactgggcaatggagcgcctgccggcccagtatcagcccgtcatacttgaagctagacaggcttatcttggacaagaagaagatcgcttggcctcgcgcgcagatcagttggaagaatttgtccactacgtgaaaggcgagatcaccaaggtagtcggcaaataatgtctaacaattcgttcaagccgacgccgcttcgcggcgcggcttaactcaagcgttagatgcactatactaaccaactagtgcgctcttccgcttcctcgctcactgactcgctgcgctcggtcgttcggctgcggcgagcggtatcagctcactcaaaggcggtaatacggttatccacagaatcaggggataacgcaggaaagaacatgtgagcaaaaggccagcaaaaggccaggaaccgtaaaaaggccgcgttgctggcgtttttccataggctccgcccccctgacgagcatcacaaaaatcgacgctcaagtcagaggtggcgaaacccgacaggactataaagataccaggcgtttccccctggaagctccctcgtgcgctctcctgttccgaccctgccgcttaccggatacctgtccgcctttctcccttcgggaagcgtggcgctttctcatagctcacgctgtaggtatctcagttcggtgtaggtcgttcgctccaagctgggctgtgtgcacgaaccccccgttcagcccgaccgctgcgccttatccggtaactatcgtcttgagtccaacccggtaagacacgacttatcgccactggcagcagccactggtaacaggattagcagagcgaggtatgtaggcggtgctacagagttcttgaagtggtggcctaactacggctacactagaagaacagtatttggtatctgcgctctgctgaagccagttaccttcggaaaaagagttggtagctcttgatccggcaaacaaaccaccgctggtagcggtggtttttttgtttgcaagcagcagattacgcgcagaaaaaaaggatctcaagaagatcctttgatcttttctacggggtctgacgctcagtggaacgaaaactcacgttaagggattttggtcatgagattatcaaaaaggatcttcacctagatccttttaaattaaaaatgaagcgtaccgacgatcttgctgcgttcggatattttcgtggagttcccgccacagacccggattgaaggcgagatccagcaactcgcgccagatcatcctgtgacggaactttggcgcgtgatgactggccaggacgtcggccgaaagagcgacaagcagatcacgcttttcgacagcgtcggatttgcgatcgaggatttttcggcgctgcgctacgtccgcgaccgcgttgagggatcaagccacagcagcccactcgaccttctagccgacccagacgagccaag

SEQ ID NO: 35 - DNA, 5520 bp, Artificial Sequence
  Synthetic construct comprising:  FRT1:CTP::SPCN::PINII TERM:FRT87
ggatctttttggaatgctgctccgtcgtcaggctttccgacgtttgggtggttgaacagaagtcattatcgcacggaatgccaagcactcccgaggggaaccctgtggttggcatgcacatacaaatggacgaacggataaaccttttcacgcccttttaaatatccgattattctaataaacgctcttttctcttaggtcgactttaacttagcctagcgaagttcctattccgaagttcctattctctagaaagtataggaacttcagatccaccgggatccccgatcatgcaaaaactcattaactcagtgcaaaactatgcctggggcagcaaaacggcgttgactgaactttatggtatggaaaatccgtccagccagccgatggccgagctgtggatgggcgcacatccgaaaagcagttcacgagtgcagaatgccgccggagatatcgtttcactgcgtgatgtgattgagagtgataaatcgactctgctcggagaggccgttgccaaacgctttggcgaactgcctttcctgttcaaagtattatgcgcagcacagccactctccattcaggttcatccaaacaaacacaattctgaaatcggttttgccaaagaaaatgccgcaggtatcccgatggatgccgccgagcgtaactataaagatcctaaccacaagccggagctggtttttgcgctgacgcctttccttgcgatgaacgcgtttcgtgaattttccgagattgtctccctactccagccggtcgcaggtgcacatccggcgattgctcactttttacaacagcctgatgccgaacgtttaagcgaactgttcgccagcctgttgaatatgcagggtgaagaaaaatcccgcgcgctggcgattttaaaatcggccctcgatagccagcagggtgaaccgtggcaaacgattcgtttaatttctgaattttacccggaagacagcggtctgttctccccgctattgctgaatgtggtgaaattgaaccctggcgaagcgatgttcctgttcgctgaaacaccgcacgcttacctgcaaggcgtggcgctggaagtgatggcaaactccgataacgtgctgcgtgcgggtctgacgcctaaatacattgatattccggaactggttgccaatgtgaaattcgaagccaaaccggctaaccagttgttgacccagccggtgaaacaaggtgcagaactggacttcccgattccagtggatgattttgccttctcgctgcatgaccttagtgataaagaaaccaccattagccagcagagtgccgccattttgttctgcgtcgaaggcgatgcaacgttgtggaaaggttctcagcagttacagcttaaaccgggtgaatcagcgtttattgccgccaacgaatcaccggtgactgtcaaaggccacggccgtttagcgcgtgtttacaacaagctgtaagagcttactgaaaaaattaacatctcttgctaagctgggggtggaacctagacttgtccatcttctggattggccaacttaattaatgtatgaaataaaaggatgcacacatagtgacatgctaatcactataatgtgggcatcaaagttgtgtgttatgtgtaattactagttatctgaataaaagagaaagagatcatccatatttcttatcctaaatgaatgtcacgtgtctttataattctttgatgaaccagatgcatttcattaaccaaatccatatacatataaatattaatcatatataattaatatcaattgggttagcaaaacaaatctagtctaggtgtgttttgcgaatgcgaccttcttatgtgcttctagtctccaaatgtggttgatagttattttgctctaagatcaacagtaatgaagtataaatcatcgttgtggtgtgctactcggttaattgagcattaacacacacaaacatgacgaggatggtataatctccaaaaatgtgtactttgttaggtgggaccctatagccttgattaatgtgctatgttaggcatgcctggaaacgtgtgacgcatatgttttgtgaacctgttgatattatatgtgcttttatattaccatattttattaaaatactaatatttattactagtaagatataacattctatctagcttaaaaactaaccataaatattccataataactagatttaccaaactaatatactaaatatacataataaatacaaaattaacaagacaataatcaatatttatgagcttaatatatttagacattatggttggtcgacgataatcatgctaacttttcgtaattgcttgattgaaatatgcttagaataatgcctctttgttctacatggcaaatagggaccattatggtgtaacaccctgggaaccacaaacaccccgaaatgctactaaactacacaactaaccttcatatataaaatttcgacagcatctcctttgaaaatttgcatagacgtggaagcaacagagtataaacagatatcatgataagaaaacatactagacattaataatctgctagaaatgggaagaatcctaacttgacgactgcgtaactgactagagtcacacttagctgaccctagtcacttacaactgacttcgtgtcctaggcttaggctactgctagtccgcggtgtatccgtgatcgagttgagcatataagaaacccttagtatgtatttgtatttgtaaaatacttctatcaataaaatttctaattcctaaaaccaaaatccagtggcgagctcgagccagggtgcttcctcaagagtcgacctgcagatgcttcggtcctagcgtatacgaagttcctattccgaagttcctattctccagaaagtataggaacttctgtacacctgagctgattccgatgacttcgtaggttcctagctcaagccgctcgtgtccaagcgtcacttacgattagctaatgattacggcatctaggaccgactagctaactaactagtacgtacgcgccgaagcaccttgccgtagaagaacagcaaggccgccaatgcctgacgatgcgtggagaccgaaaccttgcgctcgttcgccagccaggacagaaatgcctcgacttcgctgctgcccaaggttgccgggtgacgcacaccgtggaaacggatgaaggcacgaacccagtggacataagcctgttcggttcgtaagctgtaatgcaagtagcgtatgcgctcacgcaactggtccagaaccttgaccgaacgcagcggtggtaacggcgcagtggcggttttcatggcttgttatgactgtttttttggggtacagtctatgcctcgggcatccaagcagcaagcgcgttacgccgtgggtcgatgtttgatgttatggagcagcaacgatgttacgcagcagggcagtcgccctaaaacaaagttaaacatcatgagggaagcggtgatcgccgaagtatcgactcaactatcagaggtagttggcgtcatcgagcgccatctcgaaccgacgttgctggccgtacatttgtacggctccgcagtggatggcggcctgaagccacacagtgatattgatttgctggttacggtgacggtaaggcttgatgaaacaacgcggcgagctttgatcaacgaccttttggaaacttcggcttcccctggagagagcgagattctccgcgctgtagaagtcaccattgttgtgcacgacgacatcattccgtggcgttatccagctaagcgcgaactgcaatttggagaatggcagcgcaatgacattcttgcaggtatcttcgagccagccacgatcgacattgatctggctatcttgctgacaaaagcaagagaacatagcgttgccttggtaggtccagcggcggaggaactctttgatccggttcctgaacaggatctatttgaggcgctaaatgaaaccttaacgctatggaactcgccgcccgactgggctggcgatgagcgaaatgtagtgcttacgttgtcccgcatttggtacagcgcagtaaccggcaaaatcgcgccgaaggatgtcgctgccgactgggcaatggagcgcctgccggcccagtatcagcccgtcatacttgaagctagacaggcttatcttggacaagaagaagatcgcttggcctcgcgcgcagatcagttggaagaatttgtccactacgtgaaaggcgagatcaccaaggtagtcggcaaataatgtctaacaattcgttcaagccgacgccgcttcgcggcgcggcttaactcaagcgttagatgcactatacgtaaccaactagtgcgctcttccgcttcctcgctcactgactcgctgcgctcggtcgttcggctgcggcgagcggtatcagctcactcaaaggcggtaatacggttatccacagaatcaggggataacgcaggaaagaacatgtgagcaaaaggccagcaaaaggccaggaaccgtaaaaaggccgcgttgctggcgtttttccataggctccgcccccctgacgagcatcacaaaaatcgacgctcaagtcagaggtggcgaaacccgacaggactataaagataccaggcgtttccccctggaagctccctcgtgcgctctcctgttccgaccctgccgcttaccggatacctgtccgcctttctcccttcgggaagcgtggcgctttctcatagctcacgctgtaggtatctcagttcggtgtaggtcgttcgctccaagctgggctgtgtgcacgaaccccccgttcagcccgaccgctgcgccttatccggtaactatcgtcttgagtccaacccggtaagacacgacttatcgccactggcagcagccactggtaacaggattagcagagcgaggtatgtaggcggtgctacagagttcttgaagtggtggcctaactacggctacactagaagaacagtatttggtatctgcgctctgctgaagccagttaccttcggaaaaagagttggtagctcttgatccggcaaacaaaccaccgctggtagcggtggtttttttgtttgcaagcagcagattacgcgcagaaaaaaaggatctcaagaagatcctttgatcttttctacggggtctgacgctcagtggaacgaaaactcacgttaagggattttggtcatgagattatcaaaaaggatcttcacctagatccttttaaattaaaaatgaagcgtaccgacgatcttgctgcgttcggatattttcgtggagttcccgccacagacccggattgaaggcgagatccagcaactcgcgccagatcatcctgtgacggaactttggcgcgtgatgactggccaggacgtcggccgaaagagcgacaagcagatcacgcttttcgacagcgtcggatttgcgatcgaggatttttcggcgctgcgctacgtccgcgaccgcgttgagggatcaagccacagcagcccactcgaccttctagccgacccagacgagccaag

SEQ ID NO: 36 - DNA, 60907 bp, Artificial Sequence
  Synthetic construct comprising the T-DNA (RB to LB):  RB+UBI PRO:UBI1ZM INTRON::MO-FLP::PINII TERM+CaMV35S TERM+FRT1:CTP::SPCN::PINII TERM:FRT87+UBI PRO::UBI1ZM INTRON::DsRED+NOS PRO::ZM-WUS2::PINII TERM+UBI PRO:UBI1ZM
ggggggggggggggggggttccattgttcattccacggacaaaaacagagaaaggaaacgacagaggccaaaaagctcgctttcagcacctgtcgtttcctttcttttcagagggtattttaaataaaaacattaagttatgacgaagaagaacggaaacgccttaaaccggaaaattttcataaatagcgaaaacccgcgaggtcgccgccccgtaacctgtcggatcaccggaaaggacccgtaaagtgataatgattatcatctacatatcacaacgtgcgtggaggccatcaaaccacgtcaaataatcaattatgacgcaggtatcgtattaattgatctgcatcaacttaacgtaaaaacaacttcagacaatacaaatcagcgacactgaatacggggcaacctcatgtcccccccccccccccccctgcaggcatcgtggtgtcacgctcgtcgtttggtatggcttcattcagctccggttcccaacgatcaaggcgagttacatgatcccccatgttgtgcaaaaaagcggttagctccttcggtcctccgatcgttgtcagaagtaagttggccgcagtgttatcactcatggttatggcagcactgcataattctcttactgtcatgccatccgtaagatgcttttctgtgactggtgagtactcaaccaagtcattctgagaatagtgtatgcggcgaccgagttgctcttgcccggcgtcaacacgggataataccgcgccacatagcagaactttaaaagtgctcatcattggaaaacgttcttcggggcgaaaactctcaaggatcttaccgctgttgagatccagttcgatgtaacccactcgtgcacccaactgatcttcagcatcttttactttcaccagcgtttctgggtgagcaaaaacaggaaggcaaaatgccgcaaaaaagggaataagggcgacacggaaatgttgaatactcatactcttcctttttcaatattattgaagcatttatcagggttattgtctcatgagcggatacatatttgaatgtatttagaaaaataaacaaataggggttccgcgcacatttccccgaaaagtgccacctgacgtctaagaaaccattattatcatgacattaacctataaaaataggcgtatcacgaggccctttcgtcttcaagaattcggagcttttgccattctcaccggattcagtcgtcactcatggtgatttctcacttgataaccttatttttgacgaggggaaattaataggttgtattgatgttggacgagtcggaatcgcagaccgataccaggatcttgccatcctatggaactgcctcggtgagttttctccttcattacagaaacggctttttcaaaaatatggtattgataatcctgatatgaataaattgcagtttcatttgatgctcgatgagtttttctaatcagaattggttaattggttgtaacactggcagagcattacgctgacttgacgggacggcggctttgttgaataaatcgaacttttgctgagttgaaggatcagatcacgcatcttcccgacaacgcagaccgttccgtggcaaagcaaaagttcaaaatcaccaactggtccacctacaacaaagctctcatcaaccgtggctccctcactttctggctggatgatggggcgattcaggcctggtatgagtcagcaacaccttcttcacgaggcagacctcagcgccagaaggccgccagagaggccgagcgcggccgtgaggcttggacgctagggcagggcatgaaaaagcccgtagcgggctgctacgggcgtctgacgcggtggaaagggggaggggatgttgtctacatggctctgctgtagtgagtgggttgcgctccggcagcggtcctgatcaatcgtcaccctttctcggtccttcaacgttcctgacaacgagcctccttttcgccaatccatcgacaatcaccgcgagtccctgctcgaacgctgcgtccggaccggcttcgtcgaaggcgtctatcgcggcccgcaacagcggcgagagcggagcctgttcaacggtgccgccgcgctcgccggcatcgctgtcgccggcctgctcctcaagcacggccccaacagtgaagtagctgattgtcatcagcgcattgacggcgtccccggccgaaaaacccgcctcgcagaggaagcgaagctgcgcgtcggccgtttccatctgcggtgcgcccggtcgcgtgccggcatggatgcgcgcgccatcgcggtaggcgagcagcgcctgcctgaagctgcgggcattcccgatcagaaatgagcgccagtcgtcgtcggctctcggcaccgaatgcgtatgattctccgccagcatggcttcggccagtgcgtcgagcagcgcccgcttgttcctgaagtgccagtaaagcgccggctgctgaacccccaaccgttccgccagtttgcgtgtcgtcagaccgtctacgccgacctcgttcaacaggtccagggcggcacggatcactgtattcggctgcaactttgtcatgcttgacactttatcactgataaacataatatgtccaccaacttatcagtgataaagaatccgcgcgttcaatcggaccagcggaggctggtccggaggccagacgtgaaacccaacatacccctgatcgtaattctgagcactgtcgcgctcgacgctgtcggcatcggcctgattatgccggtgctgccgggcctcctgcgcgatctggttcactcgaacgacgtcaccgcccactatggcattctgctggcgctgtatgcgttggtgcaatttgcctgcgcacctgtgctgggcgcgctgtcggatcgtttcgggcggcggccaatcttgctcgtctcgctggccggcgccactgtcgactacgccatcatggcgacagcgcctttcctttgggttctctatatcgggcggatcgtggccggcatcaccggggcgactggggcggtagccggcgcttatattgccgatatcactgatggcgatgagcgcgcgcggcacttcggcttcatgagcgcctgtttcgggttcgggatggtcgcgggacctgtgctcggtgggctgatgggcggtttctccccccacgctccgttcttcgccgcggcagccttgaacggcctcaatttcctgacgggctgtttccttttgccggagtcgcacaaaggcgaacgccggccgttacgccgggaggctctcaacccgctcgcttcgttccggtgggcccggggcatgaccgtcgtcgccgccctgatggcggtcttcttcatcatgcaacttgtcggacaggtgccggccgcgctttgggtcattttcggcgaggatcgctttcactgggacgcgaccacgatcggcatttcgcttgccgcatttggcattctgcattcactcgcccaggcaatgatcaccggccctgtagccgcccggctcggcgaaaggcgggcactcatgctcggaatgattgccgacggcacaggctacatcctgcttgccttcgcgacacggggatggatggcgttcccgatcatggtcctgcttgcttcgggtggcatcggaatgccggcgctgcaagcaatgttgtccaggcaggtggatgaggaacgtcaggggcagctgcaaggctcactggcggcgctcaccagcctgacctcgatcgtcggacccctcctcttcacggcgatctatgcggcttctataacaacgtggaacgggtgggcatggattgcaggcgctgccctctacttgctctgcctgccggcgctgcgtcgcgggctttggagcggcgcagggcaacgagccgatcgctgatcgtggaaacgataggcctatgccatgcgggtcaaggcgacttccggcaagctatacgcgccctaggagtgcggttggaacgttggcccagccagatactcccgatcacgagcaggacgccgatgatttgaagcgcactcagcgtctgatccaagaacaaccatcctagcaacacggcggtccccgggctgagaaagcccagtaaggaaacaactgtaggttcgagtcgcgagatcccccggaaccaaaggaagtaggttaaacccgctccgatcaggccgagccacgccaggccgagaacattggttcctgtaggcatcgggattggcggatcaaacactaaagctactggaacgagcagaagtcctccggccgccagttgccaggcggtaaaggtgagcagaggcacgggaggttgccacttgcgggtcagcacggttccgaacgccatggaaaccgcccccgccaggcccgctgcgacgccgacaggatctagcgctgcgtttggtgtcaacaccaacagcgccacgcccgcagttccgcaaatagcccccaggaccgccatcaatcgtatcgggctacctagcagagcggcagagatgaacacgaccatcagcggctgcacagcgcctaccgtcgccgcgaccccgcccggcaggcggtagaccgaaataaacaacaagctccagaatagcgaaatattaagtgcgccgaggatgaagatgcgcatccaccagattcccgttggaatctgtcggacgatcatcacgagcaataaacccgccggcaacgcccgcagcagcataccggcgacccctcggcctcgctgttcgggctccacgaaaacgccggacagatgcgccttgtgagcgtccttggggccgtcctcctgtttgaagaccgacagcccaatgatctcgccgtcgatgtaggcgccgaatgccacggcatctcgcaaccgttcagcgaacgcctccatgggctttttctcctcgtgctcgtaaacggacccgaacatctctggagctttcttcagggccgacaatcggatctcgcggaaatcctgcacgtcggccgctccaagccgtcgaatctgagccttaatcacaattgtcaattttaatcctctgtttatcggcagttcgtagagcgcgccgtgcgtcccgagcgatactgagcgaagcaagtgcgtcgagcagtgcccgcttgttcctgaaatgccagtaaagcgctggctgctgaacccccagccggaactgaccccacaaggccctagcgtttgcaatgcaccaggtcatcattgacccaggcgtgttccaccaggccgctgcctcgcaactcttcgcaggcttcgccgacctgctcgcgccacttcttcacgcgggtggaatccgatccgcacatgaggcggaaggtttccagcttgagcgggtacggctcccggtgcgagctgaaatagtcgaacatccgtcgggccgtcggcgacagcttgcggtacttctcccatatgaatttcgtgtagtggtcgccagcaaacagcacgacgatttcctcgtcgatcaggacctggcaacgggacgttttcttgccacggtccaggacgcggaagcggtgcagcagcgacaccgattccaggtgcccaacgcggtcggacgtgaagcccatcgccgtcgcctgtaggcgcgacaggcattcctcggccttcgtgtaataccggccattgatcgaccagcccaggtcctggcaaagctcgtagaacgtgaaggtgatcggctcgccgataggggtgcgcttcgcgtactccaacacctgctgccacaccagttcgtcatcgtcggcccgcagctcgacgccggtgtaggtgatcttcacgtccttgttgacgtggaaaatgaccttgttttgcagcgcctcgcgcgggattttcttgttgcgcgtggtgaacagggcagagcgggccgtgtcgtttggcatcgctcgcatcgtgtccggccacggcgcaatatcgaacaaggaaagctgcatttccttgatctgctgcttcgtgtgtttcagcaacgcggcctgcttggcctcgctgacctgttttgccaggtcctcgccggcggtttttcgcttcttggtcgtcatagttcctcgcgtgtcgatggtcatcgacttcgccaaacctgccgcctcctgttcgagacgacgcgaacgctccacggcggccgatggcgcgggcagggcagggggagccagttgcacgctgtcgcgctcgatcttggccgtagcttgctggaccatcgagccgacggactggaaggtttcgcggggcgcacgcatgacggtgcggcttgcgatggtttcggcatcctcggcggaaaaccccgcgtcgatcagttcttgcctgtatgccttccggtcaaacgtccgattcattcaccctccttgcgggattgccccgactcacgccggggcaatgtgcccttattcctgatttgacccgcctggtgccttggtgtccagataatccaccttatcggcaatgaagtcggtcccgtagaccgtctggccgtccttctcgtacttggtattccgaatcttgccctgcacgaataccagcgaccccttgcccaaatacttgccgtgggcctcggcctgagagccaaaacacttgatgcggaagaagtcggtgcgctcctgcttgtcgccggcatcgttgcgccactcttcattaaccgctatatcgaaaattgcttgcggcttgttagaattgccatgacgtacctcggtgtcacgggtaagattaccgataaactggaactgattatggctcatatcgaaagtctccttgagaaaggagactctagtttagctaaacattggttccgctgtcaagaactttagcggctaaaattttgcgggccgcgaccaaaggtgcgaggggcggcttccgctgtgtacaaccagatatttttcaccaacatccttcgtctgctcgatgagcggggcatgacgaaacatgagctgtcggagagggcaggggtttcaatttcgtttttatcagacttaaccaacggtaaggccaacccctcgttgaaggtgatggaggccattgccgacgccctggaaactcccctacctcttctcctggagtccaccgaccttgaccgcgaggcactcgcggagattgcgggtcatcctttcaagagcagcgtgccgcccggatacgaacgcatcagtgtggttttgccgtcacataaggcgtttatcgtaaagaaatggggcgacgacacccgaaaaaagctgcgtggaaggctctgacgccaagggttagggcttgcacttccttctttagccgctaaaacggccccttctctgcgggccgtcggctcgcgcatcatatcgacatcctcaacggaagccgtgccgcgaatggcatcgggcgggtgcgctttgacagttgttttctatcagaacccctacgtcgtgcggttcgattagctgtttgtcttgcaggctaaacactttcggtatatcgtttgcctgtgcgataatgttgctaatgatttgttgcgtaggggttactgaaaagtgagcgggaaagaagagtttcagaccatcaaggagcgggccaagcgcaagctggaacgcgacatgggtgcggacctgttggccgcgctcaacgacccgaaaaccgttgaagtcatgctcaacgcggacggcaaggtgtggcacgaacgccttggcgagccgatgcggtacatctgcgacatgcggcccagccagtcgcaggcgattatagaaacggtggccggattccacggcaaagaggtcacgcggcattcgcccatcctggaaggcgagttccccttggatggcagccgctttgccggccaattgccgccggtcgtggccgcgccaacctttgcgatccgcaagcgcgcggtcgccatcttcacgctggaacagtacgtcgaggcgggcatcatgacccgcgagcaatacgaggtcattaaaagcgccgtcgcggcgcatcgaaacatcctcgtcattggcggtactggctcgggcaagaccacgctcgtcaacgcgatcatcaatgaaatggtcgccttcaacccgtctgagcgcgtcgtcatcatcgaggacaccggcgaaatccagtgcgccgcagagaacgccgtccaataccacaccagcatcgacgtctcgatgacgctgctgctcaagacaacgctgcgtatgcgccccgaccgcatcctggtcggtgaggtacgtggccccgaagcccttgatctgttgatggcctggaacaccgggcatgaaggaggtgccgccaccctgcacgcaaacaaccccaaagcgggcctgagccggctcgccatgcttatcagcatgcacccggattcaccgaaacccattgagccgctgattggcgaggcggttcatgtggtcgtccatatcgccaggacccctagcggccgtcgagtgcaagaaattctcgaagttcttggttacgagaacggccagtacatcaccaaaaccctgtaaggagtatttccaatgacaacggctgttccgttccgtctgaccatgaatcgcggcattttgttctaccttgccgtgttcttcgttctcgctctcgcgttatccgcgcatccggcgatggcctcggaaggcaccggcggcagcttgccatatgagagctggctgacgaacctgcgcaactccgtaaccggcccggtggccttcgcgctgtccatcatcggcatcgtcgtcgccggcggcgtgctgatcttcggcggcgaactcaacgccttcttccgaaccctgatcttcctggttctggtgatggcgctgctggtcggcgcgcagaacgtgatgagcaccttcttcggtcgtggtgccgaaatcgcggccctcggcaacggggcgctgcaccaggtgcaagtcgcggcggcggatgccgtgcgtgcggtagcggctggacggctcgcctaatcatggctctgcgcacgatccccatccgtcgcgcaggcaaccgagaaaacctgttcatgggtggtgatcgtgaactggtgatgttctcgggcctgatggcgtttgcgctgattttcagcgcccaagagctgcgggccaccgtggtcggtctgatcctgtggttcggggcgctctatgcgttccgaatcatggcgaaggccgatccgaagatgcggttcgtgtacctgcgtcaccgccggtacaagccgtattacccggcccgctcgaccccgttccgcgagaacaccaatagccaagggaagcaataccgatgatccaagcaattgcgattgcaatcgcgggcctcggcgcgcttctgttgttcatcctctttgcccgcatccgcgcggtcgatgccgaactgaaactgaaaaagcatcgttccaaggacgccggcctggccgatctgctcaactacgccgctgtcgtcgatgacggcgtaatcgtgggcaagaacggcagctttatggctgcctggctgtacaagggcgatgacaacgcaagcagcaccgaccagcagcgcgaagtagtgtccgcccgcatcaaccaggccctcgcgggcctgggaagtgggtggatgatccatgtggacgccgtgcggcgtcctgctccgaactacgcggagcggggcctgtcggcgttccctgaccgtctgacggcagcgattgaagaagagcgctcggtcttgccttgctcgtcggtgatgtacttcaccagctccgcgaagtcgctcttcttgatggagcgcatggggacgtgcttggcaatcacgcgcaccccccggccgttttagcggctaaaaaagtcatggctctgccctcgggcggaccacgcccatcatgaccttgccaagctcgtcctgcttctcttcgatcttcgccagcagggcgaggatcgtggcatcaccgaaccgcgccgtgcgcgggtcgtcggtgagccagagtttcagcaggccgcccaggcggcccaggtcgccattgatgcgggccagctcgcggacgtgctcatagtccacgacgcccgtgattttgtagccctggccgacggccagcaggtaggccgacaggctcatgccggccgccgccgccttttcctcaatcgctcttcgttcgtctggaaggcagtacaccttgataggtgggctgcccttcctggttggcttggtttcatcagccatccgcttgccctcatctgttacgccggcggtagccggccagcctcgcagagcaggattcccgttgagcaccgccaggtgcgaataagggacagtgaagaaggaacacccgctcgcgggtgggcctacttcacctatcctgcccggctgacgccgttggatacaccaaggaaagtctacacgaaccctttggcaaaatcctgtatatcgtgcgaaaaaggatggatataccgaaaaaatcgctataatgaccccgaagcagggttatgcagcggaaaagcgctgcttccctgctgttttgtggaatatctaccgactggaaacaggcaaatgcaggaaattactgaactgaggggacaggcgagagacgatgccaaagagctacaccgacgagctggccgagtgggttgaatcccgcgcggccaagaagcgccggcgtgatgaggctgcggttgcgttcctggcggtgagggcggatgtcgaggcggcgttagcgtccggctatgcgctcgtcaccatttgggagcacatgcgggaaacggggaaggtcaagttctcctacgagacgttccgctcgcacgccaggcggcacatcaaggccaagcccgccgatgtgcccgcaccgcaggccaaggctgcggaacccgcgccggcacccaagacgccggagccacggcggccgaagcaggggggcaaggctgaaaagccggcccccgctgcggccccgaccggcttcaccttcaacccaacaccggacaaaaaggatctactgtaatggcgaaaattcacatggttttgcagggcaagggcggggtcggcaagtcggccatcgccgcgatcattgcgcagtacaagatggacaaggggcagacacccttgtgcatcgacaccgacccggtgaacgcgacgttcgagggctacaaggccctgaacgtccgccggctgaacatcatggccggcgacgaaattaactcgcgcaacttcgacaccctggtcgagctgattgcgccgaccaaggatgacgtggtgatcgacaacggtgccagctcgttcgtgcctctgtcgcattacctcatcagcaaccaggtgccggctctgctgcaagaaatggggcatgagctggtcatccataccgtcgtcaccggcggccaggctctcctggacacggtgagcggcttcgcccagctcgccagccagttcccggccgaagcgcttttcgtggtctggctgaacccgtattgggggcctatcgagcatgagggcaagagctttgagcagatgaaggcgtacacggccaacaaggcccgcgtgtcgtccatcatccagattccggccctcaaggaagaaacctacggccgcgatttcagcgacatgctgcaagagcggctgacgttcgaccaggcgctggccgatgaatcgctcacgatcatgacgcggcaacgcctcaagatcgtgcggcgcggcctgtttgaacagctcgacgcggcggccgtgctatgagcgaccagattgaagagctgatccgggagattgcggccaagcacggcatcgccgtcggccgcgacgacccggtgctgatcctgcataccatcaacgcccggctcatggccgacagtgcggccaagcaagaggaaatccttgccgcgttcaaggaagagctggaagggatcgcccatcgttggggcgaggacgccaaggccaaagcggagcggatgctgaacgcggccctggcggccagcaaggacgcaatggcgaaggtaatgaaggacagcgccgcgcaggcggccgaagcgatccgcagggaaatcgacgacggccttggccgccagctcgcggccaaggtcgcggacgcgcggcgcgtggcgatgatgaacatgatcgccggcggcatggtgttgttcgcggccgccctggtggtgtgggcctcgttatgaatcgcagaggcgcagatgaaaaagcccggcgttgccgggctttgtttttgcgttagctgggcttgtttgacaggcccaagctctgactgcgcccgcgctcgcgctcctgggcctgtttcttctcctgctcctgcttgcgcatcagggcctggtgccgtcgggctgcttcacgcatcgaatcccagtcgccggccagctcgggatgctccgcgcgcatcttgcgcgtcgccagttcctcgatcttgggcgcgtgaatgcccatgccttccttgatttcgcgcaccatgtccagccgcgtgtgcagggtctgcaagcgggcttgctgttgggcctgctgctgctgccaggcggcctttgtacgcggcagggacagcaagccgggggcattggactgtagctgctgcaaacgcgcctgctgacggtctacgagctgttctaggcggtcctcgatgcgctccacctggtcatgctttgcctgcacgtagagcgcaagggtctgctggtaggtctgctcgatgggcgcggattctaagagggcctgctgttccgtctcggcctcctgggccgcctgtagcaaatcctcgccgctgttgccgctggactgctttactgccggggactgctgttgccctgctcgcgccgtcgtcgcagttcggcttgcccccactcgattgactgcttcatttcgagccgcagcgatgcgatctcggattgcgtcaacggacggggcagcgcggaggtgtccggcttctccttgggtgagtcggtcgatgccatagccaaaggtttccttccaaaatgcgtccattgctggaccgtgtttctcattgatgcccgcaagcatcttcggcttgaccgccaggtcaagcgcgccttcatgggcggtcatgacggacgccgccatgaccttgccgccgttgttctcgatgtagccgcgtaatgaggcaatggtgccgcccatcgtcagcgtgtcatcgacaacgatgtacttctggccggggatcacctccccctcgaaagtcgggttgaacgccaggcgatgatctgaaccggctccggttcgggcgaccttctcccgctgcacaatgtccgtttcgacctcaaggccaaggcggtcggccagaacgaccgccatcatggccggaatcttgttgttccccgccgcctcgacggcgaggactggaacgatgcggggcttgtcgtcgccgatcagcgtcttgagctgggcaacagtgtcgtccgaaatcaggcgctcgaccaaattaagcgccgcttccgcgtcgccctgcttcgcagcctggtattcaggctcgttggtcaaagaaccaaggtcgccgttgcgaaccaccttcgggaagtctccccacggtgcgcgctcggctctgctgtagctgctcaagacgcctccctttttagccgctaaaactctaacgagtgcgcccgcgactcaacttgacgctttcggcacttacctgtgccttgccacttgcgtcataggtgatgcttttcgcactcccgatttcaggtactttatcgaaatctgaccgggcgtgcattacaaagttcttccccacctgttggtaaatgctgccgctatctgcgtggacgatgctgccgtcgtggcgctgcgacttatcggccttttgggccatatagatgttgtaaatgccaggtttcagggccccggctttatctaccttctggttcgtccatgcgccttggttctcggtctggacaattctttgcccattcatgaccaggaggcggtgtttcattgggtgactcctgacggttgcctctggtgttaaacgtgtcctggtcgcttgccggctaaaaaaaagccgacctcggcagttcgaggccggctttccctagagccgggcgcgtcaaggttgttccatctattttagtgaactgcgttcgatttatcagttactttcctcccgctttgtgtttcctcccactcgtttccgcgtctagccgacccctcaacatagcggcctcttcttgggctgcctttgcctcttgccgcgcttcgtcacgctcggcttgcaccgtcgtaaagcgctcggcctgcctggccgcctcttgcgccgccaacttcctttgctcctggtgggcctcggcgtcggcctgcgccttcgctttcaccgctgccaactccgtgcgcaaactctccgcttcgcgcctggtggcgtcgcgctcgccgcgaagcgcctgcatttcctggttggccgcgtccagggtcttgcggctctcttctttgaatgcgcgggcgtcctggtgagcgtagtccagctcggcgcgcagctcctgcgctcgacgctccacctcgtcggcccgctgcgtcgccagcgcggcccgctgctcggctcctgccagggcggtgcgtgcttcggccagggcttgccgctggcgtgcggccagctcggccgcctcggcggcctgctgctctagcaatgtaacgcgcgcctgggcttcttccagctcgcgggcctgcgcctcgaaggcgtcggccagctccccgcgcacggcttccaactcgttgcgctcacgatcccagccggcttgcgctgcctgcaacgattcattggcaagggcctgggcggcttgccagagggcggccacggcctggttgccggcctgctgcaccgcgtccggcacctggactgccagcggggcggcctgcgccgtgcgctggcgtcgccattcgcgcatgccggcgctggcgtcgttcatgttgacgcgggcggccttacgcactgcatccacggtcgggaagttctcccggtcgccttgctcgaacagctcgtccgcagccgcaaaaatgcggtcgcgcgtctctttgttcagttccatgttggctccggtaattggtaagaataataatactcttacctaccttatcagcgcaagagtttagctgaacagttctcgacttaacggcaggttttttagcggctgaagggcaggcaaaaaaagccccgcacggtcggcgggggcaaagggtcagcgggaaggggattagcgggcgtcgggcttcttcatgcgtcggggccgcgcttcttgggatggagcacgacgaagcgcgcacgcgcatcgtcctcggccctatcggcccgcgtcgcggtcaggaacttgtcgcgcgctaggtcctccctggtgggcaccaggggcatgaactcggcctgctcgatgtaggtccactccatgaccgcatcgcagtcgaggccgcgttccttcaccgtctcttgcaggtcgcggtacgcccgctcgttgagcggctggtaacgggccaattggtcgtaaatggctgtcggccatgagcggcctttcctgttgagccagcagccgacgacgaagccggcaatgcaggcccctggcacaaccaggccgacgccgggggcaggggatggcagcagctcgccaaccaggaaccccgccgcgatgatgccgatgccggtcaaccagcccttgaaactatccggccccgaaacacccctgcgcattgcctggatgctgcgccggatagcttgcaacatcaggagccgtttcttttgttcgtcagtcatggtccgccctcaccagttgttcgtatcggtgtcggacgaactgaaatcgcaagagctgccggtatcggtccagccgctgtccgtgtcgctgctgccgaagcacggcgaggggtccgcgaacgccgcagacggcgtatccggccgcagcgcatcgcccagcatggccccggtcagcgagccgccggccaggtagcccagcatggtgctgttggtcgccccggccaccagggccgacgtgacgaaatcgccgtcattccctctggattgttcgctgctcggcggggcagtgcgccgcgccggcggcgtcgtggatggctcgggttggctggcctgcgacggccggcgaaaggtgcgcagcagctcgttatcgaccggctgcggcgtcggggccgccgccttgcgctgcggtcggtgttccttcttcggctcgcgcagcttgaacagcatgatcgcggaaaccagcagcaacgccgcgcctacgcctcccgcgatgtagaacagcatcggattcattcttcggtcctccttgtagcggaaccgttgtctgtgcggcgcgggtggcccgcgccgctgtctttggggatcagccctcgatgagcgcgaccagtttcacgtcggcaaggttcgcctcgaactcctggccgtcgtcctcgtacttcaaccaggcatagccttccgccggcggccgacggttgaggataaggcgggcagggcgctcgtcgtgctcgacctggacgatggcctttttcagcttgtccgggtccggctccttcgcgcccttttccttggcgtccttaccgtcctggtcgccgtcctcgccgtcctggccgtcgccggcctccgcgtcacgctcggcatcagtctggccgttgaaggcatcgacggtgttgggatcgcggcccttctcgtccaggaactcgcgcagcagcttgaccgtgccgcgcgtgatttcctgggtgtcgtcgtcaagccacgcctcgacttcctccgggcgcttcttgaaggccgtcaccagctcgttcaccacggtcacgtcgcgcacgcggccggtgttgaacgcatcggcgatcttctccggcaggtccagcagcgtgacgtgctgggtgatgaacgccggcgacttgccgatttccttggcgatatcgcctttcttcttgcccttcgccagctcgcggccaatgaagtcggcaatttcgcgcggggtcagctcgttgcgttgcaggttctcgataacctggtcggcttcgttgtagtcgttgtcgatgaacgccgggatggacttcttgccggcccacttcgagccacggtagcggcgggcgccgtgattgatgatatagcggcccggctgctcctggttctcgcgcaccgaaatgggtgacttcaccccgcgctctttgatcgtggcaccgatttccgcgatgctctccggggaaaagccggggttgtcggccgtccgcggctgatgcggatcttcgtcgatcaggtccaggtccagctcgatagggccggaaccgccctgagacgccgcaggagcgtccaggaggctcgacaggtcgccgatgctatccaaccccaggccggacggctgcgccgcgcctgcggcttcctgagcggccgcagcggtgtttttcttggtggtcttggcttgagccgcagtcattgggaaatctccatcttcgtgaacacgtaatcagccagggcgcgaacctctttcgatgccttgcgcgcggccgttttcttgatcttccagaccggcacaccggatgcgagggcatcggcgatgctgctgcgcaggccaacggtggccggaatcatcatcttggggtacgcggccagcagctcggcttggtggcgcgcgtggcgcggattccgcgcatcgaccttgctgggcaccatgccaaggaattgcagcttggcgttcttctggcgcacgttcgcaatggtcgtgaccatcttcttgatgccctggatgctgtacgcctcaagctcgatgggggacagcacatagtcggccgcgaagagggcggccgccaggccgacgccaagggtcggggccgtgtcgatcaggcacacgtcgaagccttggttcgccagggccttgatgttcgccccgaacagctcgcgggcgtcgtccagcgacagccgttcggcgttcgccagtaccgggttggactcgatgagggcgaggcgcgcggcctggccgtcgccggctgcgggtgcggtttcggtccagccgccggcagggacagcgccgaacagcttgcttgcatgcaggccggtagcaaagtccttgagcgtgtaggacgcattgccctgggggtccaggtcgatcacggcaacccgcaagccgcgctcgaaaaagtcgaaggcaagatgcacaagggtcgaagtcttgccgacgccgcctttctggttggccgtgaccaaagttttcatcgtttggtttcctgttttttcttggcgtccgcttcccacttccggacgatgtacgcctgatgttccggcagaaccgccgttacccgcgcgtacccctcgggcaagttcttgtcctcgaacgcggcccacacgcgatgcaccgcttgcgacactgcgcccctggtcagtcccagcgacgttgcgaacgtcgcctgtggcttcccatcgactaagacgccccgcgctatctcgatggtctgctgccccacttccagcccctggatcgcctcctggaactggctttcggtaagccgtttcttcatggataacacccataatttgctccgcgccttggttgaacatagcggtgacagccgccagcacatgagagaagtttagctaaacatttctcgcacgtcaacacctttagccgctaaaactcgtccttggcgtaacaaaacaaaagcccggaaaccgggctttcgtctcttgccgcttatggctctgcacccggctccatcaccaacaggtcgcgcacgcgcttcactcggttgcggatcgacactgccagcccaacaaagccggttgccgccgccgccaggatcgcgccgatgatgccggccacaccggccatcgcccaccaggtcgccgccttccggttccattcctgctggtactgcttcgcaatgctggacctcggctcaccataggctgaccgctcgatggcgtatgccgcttctccccttggcgtaaaacccagcgccgcaggcggcattgccatgctgcccgccgctttcccgaccacgacgcgcgcaccaggcttgcggtccagaccttcggccacggcgagctgcgcaaggacataatcagccgccgacttggctccacgcgcctcgatcagctcttgcactcgcgcgaaatccttggcctccacggccgccatgaatcgcgcacgcggcgaaggctccgcagggccggcgtcgtgatcgccgccgagaatgcccttcaccaagttcgacgacacgaaaatcatgctgacggctatcaccatcatgcagacggatcgcacgaacccgctgaattgaacacgagcacggcacccgcgaccactatgccaagaatgcccaaggtaaaaattgccggccccgccatgaagtccgtgaatgccccgacggccgaagtgaagggcaggccgccacccaggccgccgccctcactgcccggcacctggtcgctgaatgtcgatgccagcacctgcggcacgtcaatgcttccgggcgtcgcgctcgggctgatcgcccatcccgttactgccccgatcccggcaatggcaaggactgccagcgctgccatttttggggtgaggccgttcgcggccgaggggcgcagcccctggggggatgggaggcccgcgttagcgggccgggagggttcgagaagggggggcaccccccttcggcgtgcgcggtcacgcgcacagggcgcagccctggttaaaaacaaggtttataaatattggtttaaaagcaggttaaaagacaggttagcggtggccgaaaaacgggcggaaacccttgcaaatgctggattttctgcctgtggacagcccctcaaatgtcaataggtgcgcccctcatctgtcagcactctgcccctcaagtgtcaaggatcgcgcccctcatctgtcagtagtcgcgcccctcaagtgtcaataccgcagggcacttatccccaggcttgtccacatcatctgtgggaaactcgcgtaaaatcaggcgttttcgccgatttgcgaggctggccagctccacgtcgccggccgaaatcgagcctgcccctcatctgtcaacgccgcgccgggtgagtcggcccctcaagtgtcaacgtccgcccctcatctgtcagtgagggccaagttttccgcgaggtatccacaacgccggcggccgcggtgtctcgcacacggcttcgacggcgtttctggcgcgtttgcagggccatagacggccgccagcccagcggcgagggcaaccagcccggtgagcgtcggaaaggcgctggaagccccgtagcgacgcggagaggggcgagacaagccaagggcgcaggctcgatgcgcagcacgacatagccggttctcgcaaggacgagaatttccctgcggtgcccctcaagtgtcaatgaaagtttccaacgcgagccattcgcgagagccttgagtccacgctagatgagagctttgttgtaggtggaccagttggtgattttgaacttttgctttgccacggaacggtctgcgttgtcgggaagatgcgtgatctgatccttcaactcagcaaaagttcgatttattcaacaaagccacgttgtgtctcaaaatctctgatgttacattgcacaagataaaaatatatcatcatgaacaataaaactgtctgcttacataaacagtaatacaaggggtgttatgagccatattcaacgggaaacgtcttgctcgactctagagctcgttcctcgaggcctcgaggcctcgaggaacggtacctgcggggaagcttacaataatgtgtgttgttaagtcttgttgcctgtcatcgtctgactgactttcgtcataaatcccggcctccgtaacccagctttgggcaagctcacggatttgatccggcggaacgggaatatcgagatgccgggctgaacgctgcagttccagctttccctttcgggacaggtactccagctgattgattatctgctgaagggtcttggttccacctcctggcacaatgcgaatgattacttgagcgcgatcgggcatccaattttctcccgtcaggtgcgtggtcaagtgctacaaggcacctttcagtaacgagcgaccgtcgatccgtcgccgggatacggacaaaatggagcgcagtagtccatcgagggcggcgaaagcctcgccaaaagcaatacgttcatctcgcacagcctccagatccgatcgagggtcttcggcgtaggcagatagaagcatggatacattgcttgagagtattccgatggactgaagtatggcttccatcttttctcgtgtgtctgcatctatttcgagaaagcccccgatgcggcgcaccgcaacgcgaattgccatactatccgaaagtcccagcaggcgcgcttgataggaaaaggtttcatactcggccgatcgcagacgggcactcacgaccttgaacccttcaactttcagggatcgatgctggttgatggtagtctcactcgacgtggctctggtgtgttttgacatagcttcctccaaagaaagcggaaggtctggatactccagcacgaaatgtgcccgggtagacggatggaagtctagccctgctcaatatgaaatcaacagtacatttacagtcaatactgaatatacttgctacatttgcaattgtcttataacgaatgtgaaataaaaatagtgtaacaacgcttttactcatcgataatcacaaaaacatttatacgaacaaaaatacaaatgcactccggtttcacaggataggcgggatcagaatatgcaacttttgacgttttgttctttcaaagggggtgctggcaaaaccaccgcactcatgggcctttgcgctgctttggcaaatgacggtaaacgagtggccctctttgatgccgacgaaaaccggcctctgacgcgatggagagaaaacgccttacaaagcagtactgggatcctcgctgtgaagtctattccgccgacgaaatgccccttcttgaagcagcctatgaaaatgccgagctcgaaggatttgattatgcgttggccgatacgcgtggcggctcgagcgagctcaacaacacaatcatcgctagctcaaacctgcttctgatccccaccatgctaacgccgctcgacatcgatgaggcactatctacctaccgctacgtcatcgagctgctgttgagtgaaaatttggcaattcctacagctgttttgcgccaacgcgtcccggtcggccgattgacaacatcgcaacgcaggatgtcagagacgctagagagccttccagttgtaccgtctcccatgcatgaaagagatgcatttgccgcgatgaaagaacgcggcatgttgcatcttacattactaaacacgggaactgatccgacgatgcgcctcatagagaggaatcttcggattgcgatggaggaagtcgtggtcatttcgaaactgatcagcaaaatcttggaggcttgaagatggcaattcgcaagcccgcattgtcggtcggcgaagcacggcggcttgctggtgctcgacccgagatccaccatcccaacccgacacttgttccccagaagctggacctccagcacttgcctgaaaaagccgacgagaaagaccagcaacgtgagcctctcgtcgccgatcacatttacagtcccgatcgacaacttaagctaactgtggatgcccttagtccacctccgtccccgaaaaagctccaggtttttctttcagcgcgaccgcccgcgcctcaagtgtcgaaaacatatgacaacctcgttcggcaatacagtccctcgaagtcgctacaaatgattttaaggcgcgcgttggacgatttcgaaagcatgctggcagatggatcatttcgcgtggccccgaaaagttatccgatcccttcaactacagaaaaatccgttctcgttcagacctcacgcatgttcccggttgcgttgctcgaggtcgctcgaagtcattttgatccgttggggttggagaccgctcgagctttcggccacaagctggctaccgccgcgctcgcgtcattctttgctggagagaagccatcgagcaattggtgaagagggacctatcggaacccctcaccaaatattgagtgtaggtttgaggccgctggccgcgtcctcagtcaccttttgagccagataattaagagccaaatgcaattggctcaggctgccatcgtccccccgtgcgaaacctgcacgtccgcgtcaaagaaataaccggcacctcttgctgtttttatcagttgagggcttgacggatccgcctcaagtttgcggcgcagccgcaaaatgagaacatctatactcctgtcgtaaacctcctcgtcgcgtactcgactggcaatgagaagttgctcgcgcgatagaacgtcgcggggtttctctaaaaacgcgaggagaagattgaactcacctgccgtaagtttcacctcaccgccagcttcggacatcaagcgacgttgcctgagattaagtgtccagtcagtaaaacaaaaagaccgtcggtctttggagcggacaacgttggggcgcacgcgcaaggcaacccgaatgcgtgcaagaaactctctcgtactaaacggcttagcgataaaatcacttgctcctagctcgagtgcaacaactttatccgtctcctcaaggcggtcgccactgataattatgattggaatatcagactttgccgccagatttcgaacgatctcaagcccatcttcacgacctaaatttagatcaacaaccacgacatcgaccgtcgcggaagagagtactctagtgaactgggtgctgtcggctaccgcggtcactttgaaggcgtggatcgtaaggtattcgataataagatgccgcatagcgacatcgtcatcgataagaagaacgtgtttcaacggctcacctttcaatctaaaatctgaacccttgttcacagcgcttgagaaattttcacgtgaaggatgtacaatcatctccagctaaatgggcagttcgtcagaattgcggctgaccgcggatgacgaaaatgcgaaccaagtatttcaattttatgacaaaagttctcaatcgttgttacaagtgaaacgcttcgaggttacagctactattgattaaggagatcgcctatggtctcgccccggcgtcgtgcgtccgccgcgagccagatctcgcctacttcataaacgtcctcataggcacggaatggaatgatgacatcgatcgccgtagagagcatgtcaatcagtgtgcgatcttccaagctagcaccttgggcgctacttttgacaagggaaaacagtttcttgaatccttggattggattcgcgccgtgtattgttgaaatcgatcccggatgtcccgagacgacttcactcagataagcccatgctgcatcgtcgcgcatctcgccaagcaatatccggtccggccgcatacgcagacttgcttggagcaagtgctcggcgctcacagcacccagcccagcaccgttcttggagtagagtagtctaacatgattatcgtgtggaatgacgagttcgagcgtatcttctatggtgattagcctttcctggggggggatggcgctgatcaaggtcttgctcattgttgtcttgccgcttccggtagggccacatagcaacatcgtcagtcggctgacgacgcatgcgtgcagaaacgcttccaaatccccgttgtcaaaatgctgaaggatagcttcatcatcctgattttggcgtttccttcgtgtctgccactggttccacctcgaagcatcataacgggaggagacttctttaagaccagaaacacgcgagcttggccgtcgaatggtcaagctgacggtgcccgagggaacggtcggcggcagacagatttgtagtcgttcaccaccaggaagttcagtggcgcagagggggttacgtggtccgacatcctgctttctcagcgcgcccgctaaaatagcgatatcttcaagatcatcataagagacgggcaaaggcatcttggtaaaaatgccggcttggcgcacaaatgcctctccaggtcgattgatcgcaatttcttcagtcttcgggtcatcgagccattccaaaatcggcttcagaagaaagcgtagttgcggatccacttccatttacaatgtatcctatctctaagcggaaatttgaattcattaagagcggcggttcctcccccgcgtggcgccgccagtcaggcggagctggtaaacaccaaagaaatcgaggtcccgtgctacgaaaatggaaacggtgtcaccctgattcttcttcagggttggcggtatgttgatggttgccttaagggctgtctcagttgtctgctcaccgttattttgaaagctgttgaagctcatcccgccacccgagctgccggcgtaggtgctagctgcctggaaggcgccttgaacaacactcaagagcatagctccgctaaaacgctgccagaagtggctgtcgaccgagcccggcaatcctgagcgaccgagttcgtccgcgcttggcgatgttaacgagatcatcgcatggtcaggtgtctcggcgcgatcccacaacacaaaaacgcgcccatctccctgttgcaagccacgctgtatttcgccaacaacggtggtgccacgatcaagaagcacgatattgttcgttgttccacgaatatcctgaggcaagacacactttacatagcctgccaaatttgtgtcgattgcggtttgcaagatgcacggaattattgtcccttgcgttaccataaaatcggggtgcggcaagagcgtggcgctgctgggctgcagctcggtgggtttcatacgtatcgacaaatcgttctcgccggacacttcgccattcggcaaggagttgtcgtcacgcttgccttcttgtcttcggcccgtgtcgccctgaatggcgcgtttgctgaccccttgatcgccgctgctatatgcaaaaatcggtgtttcttccggccgtggctcatgccgctccggttcgcccctcggcggtagaggagcagcaggctgaacagcctcttgaaccgctggaggatccggcggcacctcaatcggagctggatgaaatggcttggtgtttgttgcgatcaaagttgacggcgatgcgttctcattcaccttcttttggcgcccacctagccaaatgaggcttaatgataacgcgagaacgacacctccgacgatcaatttctgagaccccgaaagacgccggcgatgtttgtcggagaccagggatccagatgcatcaacctcatgtgccgcttgctgactatcgttattcatcccttcgcccccttcaggacgcgtttcacatcgggcctcaccgtgcccgtttgcggcctttggccaacgggatcgtaagcggtgttccagatacatagtactgtgtggccatccctcagacgccaacctcgggaaaccgaagaaatctcgacatcgctccctttaactgaatagttggcaacagcttccttgccatcaggattgatggtgtagatggagggtatgcgtacattgcccggaaagtggaataccgtcgtaaatccattgtcgaagacttcgagtggcaacagcgaacgatcgccttgggcgacgtagtgccaattactgtccgccgcaccaagggctgtgacaggctgatccaataaattctcagctttccgttgatattgtgcttccgcgtgtagtctgtccacaacagccttctgttgtgcctcccttcgccgagccgccgcatcgtcggcggggtaggcgaattggacgctgtaatagagatcgggctgctctttatcgaggtgggacagagtcttggaacttatactgaaaacataacggcgcatcccggagtcgcttgcggttagcacgattactggctgaggcgtgaggacctggcttgccttgaaaaatagataatttccccgcggtagggctgctagatctttgctatttgaaacggcaaccgctgtcaccgtttcgttcgtggcgaatgttacgaccaaagtagctccaaccgccgtcgagaggcgcaccacttgatcgggattgtaagccaaataacgcatgcgcggatctagcttgcccgccattggagtgtcttcagcctccgcaccagtcgcagcggcaaataaacatgctaaaatgaaaagtgcttttctgatcatggttcgctgtggcctacgtttgaaacggtatcttccgatgtctgataggaggtgacaaccagacctgccgggttggttagtctcaatctgccgggcaagctggtcaccttttcgtagcgaactgtcgcggtccacgtactcaccacaggcattttgccgtcaacgacgagggtccttttatagcgaatttgctgcgtgcttggagttacatcatttgaagcgatgtgctcgacctccaccctgccgcgtttgccaagaatgacttgaggcgaactgggattgggatagttgaagaattgctggtaatcctggcgcactgttggggcactgaagttcgataccaggtcgtaggcgtactgagcggtgtcggcatcataactctcgcgcaggcgaacgtactcccacaatgaggcgttaacgacggcctcctcttgagttgcaggcaatcgcgagacagacacctcgctgtcaacggtgccgtccggccgtatccatagatatacgggcacaagcctgctcaacggcaccattgtggctatagcgaacgcttgagcaacatttcccaaaatcgcgatagctgcgacagctgcaatgagtttggagagacgtcgcgccgatttcgctcgcgcggtttgaaaggcttctacttccttatagtgctcggcaaggctttcgcgcgccactagcatggcatattcaggccccgtcatagcgtccacccgaattgccgagctgaagatctgacggagtaggctgccatcgccccacattcagcgggaagatcgggcctttgcagctcgctaatgtgtcgtttgtctggcagccgctcaaagcgacaactaggcacagcaggcaatacttcatagaattctccattgaggcgaatttttgcgcgacctagcctcgctcaacctgagcgaagcgacggtacaagctgctggcagattgggttgcgccgctccagtaactgcctccaatgttgccggcgatcgccggcaaagcgacaatgagcgcatcccctgtcagaaaaaacatatcgagttcgtaaagaccaatgatcttggccgcggtcgtaccggcgaaggtgattacaccaagcataagggtgagcgcagtcgcttcggttaggatgacgatcgttgccacgaggtttaagaggagaagcaagagaccgtaggtgataagttgcccgatccacttagctgcgatgtcccgcgtgcgatcaaaaatatatccgacgaggatcagaggcccgatcgcgagaagcactttcgtgagaattccaacggcgtcgtaaactccgaaggcagaccagagcgtgccgtaaaggacccactgtgccccttggaaagcaaggatgtcctggtcgttcatcggaccgatttcggatgcgattttctgaaaaacggcctgggtcacggcgaacattgtatccaactgtgccggaacagtctgcagaggcaagccggttacactaaactgctgaacaaagtttgggaccgtcttttcgaagatggaaaccacatagtcttggtagttagcctgcccaacaattagagcaacaacgatggtgaccgtgatcacccgagtgataccgctacgggtatcgacttcgccgcgtatgactaaaataccctgaacaataatccaaagagtgacacaggcgatcaatggcgcactcaccgcctcctggatagtctcaagcatcgagtccaagcctgtcgtgaaggctacatcgaagatcgtatgaatggccgtaaacggcgccggaatcgtgaaattcatcgattggacctgaacttgactggtttgtcgcataatgttggataaaatgagctcgcattcggcgaggatgcgggcggatgaacaaatcgcccagccttaggggagggcaccaaagatgacagcggtcttttgatgctccttgcgttgagcggccgcctcttccgcctcgtgaaggccggcctgcgcggtagtcatcgttaataggcttgtcgcctgtacattttgaatcattgcgtcatggatctgcttgagaagcaaaccattggtcacggttgcctgcatgatattgcgagatcgggaaagctgagcagacgtatcagcattcgccgtcaagcgtttgtccatcgtttccagattgtcagccgcaatgccagcgctgtttgcggaaccggtgatctgcgatcgcaacaggtccgcttcagcatcactacccacgactgcacgatctgtatcgctggtgatcgcacgtgccgtggtcgacattggcattcgcggcgaaaacatttcattgtctaggtccttcgtcgaaggatactgatttttctggttgagcgaagtcagtagtccagtaacgccgtaggccgacgtcaacatcgtaaccatcgctatagtctgagtgagattctccgcagtcgcgagcgcagtcgcgagcgtctcagcctccgttgccgggtcgctaacaacaaactgcgcccgcgcgggctgaatatatagaaagctgcaggtcaaaactgttgcaataagttgcgtcgtcttcatcgtttcctaccttatcaatcttctgcctcgtggtgacgggccatgaattcgctgagccagccagatgagttgccttcttgtgcctcgcgtagtcgagttgcaaagcgcaccgtgttggcacgccccgaaagcacggcgacatattcacgcatatcccgcagatcaaattcgcagatgacgcttccactttctcgtttaagaagaaacttacggctgccgaccgtcatgtcttcacggatcgcctgaaattccttttcggtacatttcagtccatcgacataagccgatcgatctgcggttggtgatggatagaaaatcttcgtcatacattgcgcaaccaagctggctcctagcggcgattccagaacatgctctggttgctgcgttgccagtattagcatcccgttgttttttcgaacggtcaggaggaatttgtcgacgacagtcgaaaatttagggtttaacaaataggcgcgaaactcatcgcagctcatcacaaaacggcggccgtcgatcatggctccaatccgatgcaggagatatgctgcagcgggagcgcatacttcctcgtattcgagaagatgcgtcatgtcgaagccggtaatcgacggatctaactttacttcgtcaacttcgccgtcaaatgcccagccaagcgcatggccccggcaccagcgttggagccgcgctcctgcgccttcggcgggcccatgcaacaaaaattcacgtaaccccgcgattgaacgcatttgtggatcaaacgagagctgacgatggataccacggaccagacggcggttctcttccggagaaatcccaccccgaccatcactctcgatgagagccacgatccattcgcgcagaaaatcgtgtgaggctgctgtgttttctaggccacgcaacggcgccaacccgctgggtgtgcctctgtgaagtgccaaatatgttcctcctgtggcgcgaaccagcaattcgccaccccggtccttgtcaaagaacacgaccgtacctgcacggtcgaccatgctctgttcgagcatggctagaacaaacatcatgagcgtcgtcttacccctcccgataggcccgaatattgccgtcatgccaacatcgtgctcatgcgggatatagtcgaaaggcgttccgccattggtacgaaatcgggcaatcgcgttgccccagtggcctgagctggcgccctctggaaagttttcgaaagagacaaaccctgcgaaattgcgtgaagtgattgcgccagggcgtgtgcgccacttaaaattccccggcaattgggaccaataggccgcttccataccaataccttcttggacaaccacggcacctgcatccgccattcgtgtccgagcccgcgcgcccctgtccccaagactattgagatcgtctgcatagacgcaaaggctcaaatgatgtgagcccataacgaattcgttgctcgcaagtgcgtcctcagcctcggataatttgccgatttgagtcacggctttatcgccggaactcagcatctggctcgatttgaggctaagtttcgcgtgcgcttgcgggcgagtcaggaacgaaaaactctgcgtgagaacaagtggaaaatcgagggatagcagcgcgttgagcatgcccggccgtgtttttgcagggtattcgcgaaacgaatagatggatccaacgtaactgtcttttggcgttctgatctcgagtcctcgcttgccgcaaatgactctgtcggtataaatcgaagcgccgagtgagccgctgacgaccggaaccggtgtgaaccgaccagtcatgatcaaccgtagcgcttcgccaatttcggtgaagagcacaccctgcttctcgcggatgccaagacgatgcaggccatacgctttaagagagccagcgacaacatgccaaagatcttccatgttcctgatctggcccgtgagatcgttttccctttttccgcttagcttggtgaacctcctctttaccttccctaaagccgcctgtgggtagacaatcaacgtaaggaagtgttcattgcggaggagttggccggagagcacgcgctgttcaaaagcttcgttcaggctagcggcgaaaacactacggaagtgtcgcggcgccgatgatggcacgtcggcatgacgtacgaggtgagcatatattgacacatgatcatcagcgatattgcgcaacagcgtgttgaacgcacgacaacgcgcattgcgcatttcagtttcctcaagctcgaatgcaacgccatcaattctcgcaatggtcatgatcgatccgtcttcaagaaggacgatatggtcgctgaggtggccaatataagggagatagatctcaccggatctttcggtcgttccactcgcgccgagcatcacaccattcctctccctcgtgggggaaccctaattggatttgggctaacagtagcgcccccccaaactgcactatcaatgcttcttcccgcggtccgcaaaaatagcaggacgacgctcgccgcattgtagtctcgctccacgatgagccgggctgcaaaccataacggcacgagaacgacttcgtagagcgggttctgaacgataacgatgacaaagccggcgaacatcatgaataaccctgccaatgtcagtggcaccccaagaaacaatgcgggccgtgtggctgcgaggtaaagggtcgattcttccaaacgatcagccatcaactaccgccagtgagcgtttggccgaggaagctcgccccaaacatgataacaatgccgccgacgacgccggcaaccagcccaagcgaagcccgcccgaacatccaggagatcccgatagcgacaatgccgagaacagcgagtgactggccgaacggaccaaggataaacgtgcatatattgttaaccattgtggcggggtcagtgccgccacccgcagattgcgctgcggcgggtccggatgaggaaatgctccatgcaattgcaccgcacaagcttggggcgcagctcgatatcacgcgcatcatcgcattcgagagcgagaggcgatttagatgtaaacggtatctctcaaagcatcgcatcaatgcgcacctccttagtataagtcgaataagacttgattgtcgtctgcggatttgccgttgtcctggtgtggcggtggcggagcgattaaaccgccagcgccatcctcctgcgagcggcgctgatatgacccccaaacatcccacgtctcttcggattttagcgcctcgtgatcgtcttttggaggctcgattaacgcgggcaccagcgattgagcagctgtttcaacttttcgcacgtagccgtttgcaaaaccgccgatgaaattaccggtgttgtaagcggagatcgcccgacgaagcgcaaattgcttctcgtcaatcgtttcgccgcctgcataacgacttttcagcatgtttgcagcggcagataatgatgtgcacgcctggagcgcaccgtcaggtgtcagaccgagcatagaaaaatttcgagagtttatttgcatgaggccaacatccagcgaatgccgtgcatcgagacggtgcctgacgacttgggttgcttggctgtgatcttgccagtgaagcgtttcgccggtcgtgttgtcatgaatcgctaaaggatcaaagcgactctccaccttagctatcgccgcaagcgtagatgtcgcaactgatggggcacacttgcgagcaacatggtcaaactcagcagatgagagtggcgtggcaaggctcgacgaacagaaggagaccatcaaggcaagagaaagcgaccccgatctcttaagcataccttatctccttagctcgcaactaacaccgcctctcccgttggaagaagtgcgttgttttatgttgaagattatcgggagggtcggttactcgaaaattttcaattgcttctttatgatttcaattgaagcgagaaacctcgcccggcgtcttggaacgcaacatggaccgagaaccgcgcatccatgactaagcaaccggatcgacctattcaggccgcagttggtcaggtcaggctcagaacgaaaatgctcggcgaggttacgctgtctgtaaacccattcgatgaacgggaagcttccttccgattgctcttggcaggaatattggcccatgcctgcttgcgctttgcaaatgctcttatcgcgttggtatcatatgccttgtccgccagcagaaacgcactctaagcgattatttgtaaaaatgtttcggtcatgcggcggtcatgggcttgacccgctgtcagcgcaagacggatcggtcaaccgtcggcatcgacaacagcgtgaatcttggtggtcaaaccgccacgggaacgtcccatacagccatcgtcttgatcccgctgtttcccgtcgccgcatgttggtggacgcggacacaggaactgtcaatcatgacgacattctatcgaaagccttggaaatcacactcagaatatgatcccagacgtctgcctcacgccatcgtacaaagcgattgtagcaggttgtacaggaaccgtatcgatcaggaacgtctgcccagggcgggcccgtccggaagcgccacaagatgacattgatcacccgcgtcaacgcgcggcacgcgacgcggcttatttgggaacaaaggactgaacaacagtccattcgaaatcggtgacatcaaagcggggacgggttatcagtggcctccaagtcaagcctcaatgaatcaaaatcagaccgatttgcaaacctgatttatgagtgtgcggcctaaatgatgaaatcgtccttctagatcgcctccgtggtgtagcaacacctcgcagtatcgccgtgctgaccttggccagggaattgactggcaagggtgctttcacatgaccgctcttttggccgcgatagatgatttcgttgctgctttgggcacgtagaaggagagaagtcatatcggagaaattcctcctggcgcgagagcctgctctatcgcgacggcatcccactgtcgggaacagaccggatcattcacgaggcgaaagtcgtcaacacatgcgttataggcatcttcccttgaaggatgatcttgttgctgccaatctggaggtgcggcagccgcaggcagatgcgatctcagcgcaacttgcggcaaaacatctcactcacctgaaaaccactagcgagtctcgcgatcagacgaaggccttttacttaacgacacaatatccgatgtctgcatcacaggcgtcgctatcccagtcaatactaaagcggtgcaggaactaaagattactgatgacttaggcgtgccacgaggcctgagacgacgcgcgtagacagttttttgaaatcattatcaaagtgatggcctccgctgaagcctatcacctctgcgccggtctgtcggagagatgggcaagcattattacggtcttcgcgcccgtacatgcattggacgattgcagggtcaatggatctgagatcatccagaggattgccgcccttaccttccgtttcgagttggagccagcccctaaatgagacgacatagtcgacttgatgtgacaatgccaagagagagatttgcttaacccgatttttttgctcaagcgtaagcctattgaagcttgccggcatgacgtccgcgccgaaagaatatcctacaagtaaaacattctgcacaccgaaatgcttggtgtagacatcgattatgtgaccaagatccttagcagtttcgcttggggaccgctccgaccagaaataccgaagtgaactgacgccaatgacaggaatcccttccgtctgcagataggtaccatcgatagatctgctgcctcgcgcgtttcggtgatgacggtgaaaacctctgacacatgcagctcccggagacggtcacagcttgtctgtaagcggatgccgggagcagacaagcccgtcagggcgcgtcagcgggtgttggcgggtgtcggggcgcagccatgacccagtcacgtagcgatagcggagtgtatactggcttaactatgcggcatcagagcagattgtactgagagtgcaccatatgcggtgtgaaataccgcacagatgcgtaaggagaaaataccgcatcaggcgctcttccgcttcctcgctcactgactcgctgcgctcggtcgttcggctgcggcgagcggtatcagctcactcaaaggcggtaatacggttatccacagaatcaggggataacgcaggaaagaacatgtgagcaaaaggccagcaaaaggccaggaaccgtaaaaaggccgcgttgctggcgtttttccataggctccgcccccctgacgagcatcacaaaaatcgacgctcaagtcagaggtggcgaaacccgacaggactataaagataccaggcgtttccccctggaagctccctcgtgcgctctcctgttccgaccctgccgcttaccggatacctgtccgcctttctcccttcgggaagcgtggcgctttctcatagctcacgctgtaggtatctcagttcggtgtaggtcgttcgctccaagctgggctgtgtgcacgaaccccccgttcagcccgaccgctgcgccttatccggtaactatcgtcttgagtccaacccggtaagacacgacttatcgccactggcagcagccactggtaacaggattagcagagcgaggtatgtaggcggtgctacagagttcttgaagtggtggcctaactacggctacactagaaggacagtatttggtatctgcgctctgctgaagccagttaccttcggaaaaagagttggtagctcttgatccggcaaacaaaccaccgctggtagcggtggtttttttgtttgcaagcagcagattacgcgcagaaaaaaaggatctcaagaagatcctttgatcttttctacggggtctgacgctcagtggaacgaaaactcacgttaagggattttggtcatgagattatcaaaaaggatcttcacctagatccttttaaattaaaaatgaagttttaaatcaatctaaagtatatatgagtaaacttggtctgacagttaccaatgcttaatcagtgaggcacctatctcagcgatctgtctatttcgttcatccatagttgcctgactccccgtcgtgtagataactacgatacgggagggcttaccatctggccccagtgctgcaatgataccgcgagacccacgctcaccggctccagatttatcagcaataaaccagccagccggaagggccgagcgcagaagtggtcctgcaactttatccgcctccatccagtctattaattgttgccgggaagctagagtaagtagttcgccagttaatagtttgcgcaacgttgttgccattgctgcagggggggggggggggggggacttccattgttcattccacggacaaaaacagagaaaggaaacgacagaggccaaaaagcctcgctttcagcacctgtcgtttcctttcttttcagagggtattttaaataaaaacattaagttatgacgaagaagaacggaaacgccttaaaccggaaaattttcataaatagcgaaaacccgcgaggtcgccgccccgtaacctgtcggatcaccggaaaggacccgtaaagtgataatgattatcatctacatatcacaacgtgcgtggaggccatcaaaccacgtcaaataatcaattatgacgcaggtatcgtattaattgatctgcatcaacttaacgtaaaaacaacttcagacaatacaaatcagcgacactgaatacggggcaacctcatgtcccccccccccccccccctgcaggcatcgtggtgtcacgctcgtcgtttggtatggcttcattcagctccggttcccaacgatcaaggcgagttacatgatcccccatgttgtgcaaaaaagcggttagctccttcggtcctccgatcgttgtcagaagtaagttggccgcagtgttatcactcatggttatggcagcactgcataattctcttactgtcatgccatccgtaagatgcttttctgtgactggtgagtactcaaccaagtcattctgagaatagtgtatgcggcgaccgagttgctcttgcccggcgtcaacacgggataataccgcgccacatagcagaactttaaaagtgctcatcattggaaaacgttcttcggggcgaaaactctcaaggatcttaccgctgttgagatccagttcgatgtaacccactcgtgcacccaactgatcttcagcatcttttactttcaccagcgtttctgggtgagcaaaaacaggaaggcaaaatgccgcaaaaaagggaataagggcgacacggaaatgttgaatactcatactcttcctttttcaatattattgaagcatttatcagggttattgtctcatgagcggatacatatttgaatgtatttagaaaaataaacaaataggggttccgcgcacatttccccgaaaagtgccacctgacgtctaagaaaccattattatcatgacattaacctataaaaataggcgtatcacgaggccctttcgtcttcaagaattggtcgacgatcttgctgcgttcggatattttcgtggagttcccgccacagacccggattgaaggcgagatccagcaactcgcgccagatcatcctgtgacggaactttggcgcgtgatgactggccaggacgtcggccgaaagagcgacaagcagatcacgcttttcgacagcgtcggatttgcgatcgaggatttttcggcgctgcgctacgtccgcgaccgcgttgagggatcaagccacagcagcccactcgaccttctagccgacccagacgagccaagggatctttttggaatgctgctccgtcgtcaggctttccgacgtttgggtggttgaacagaagtcattatcgtacggaatgccaagcactcccgaggggaaccctgtggttggcatgcacatacaaatggacgaacggataaaccttttcacgcccttttaaatatccgattattctaataaacgctcttttctcttaggtttacccgccaatatatcctgtcaaacactgatagtttaaactgaaggcgggaaacgacaatctgatcatgagcggagaattaagggagtcacgttatgacccccgccgatgacgcgggacaagccgttttacgtttggaactgacagaaccgcaacgttgaaggagccactcagcaagctggtacgattgtaatacgactcactatagggcgaattgagcgctgtttaaacgctcttcaactggaagagcggttactaccggctggatggcggggccttgatcgtgcaccgccggcgtccggactaactaactagtcgagctagttaccctatgaggtgacatgaagcgctcacggttactatgacggttagcttcacgactgttggtggcagtagcgtacgacttagctatagttccggacttaccgggcccaccggtggtaccgagctcgtttaaacgctcttcaactggaagagcggttaccagagctggtcacctttgtccaccaagatggaactggcgcggctaatttaaatcctgaggatcaactttgtatagaaaagttgggccgaattcgagctcggtacggccagaatggcccggaccgggttaccgaattcgagctcggtaccctgggatccggtgcgggcctcttcgctattacgccagctggcgaaagggggatgtgctgcaaggcgattaagttgggtaacgccagggttttcccagtcacgacgttgtaaaacgacggccagtgccaagctcagatcagcttgcatgcctgcagtgcagcgtgacccggtcgtgcccctctctagagataatgagcattgcatgtctaagttataaaaaattaccacatattttttttgtcacacttgtttgaagtgcagtttatctatctttatacatatatttaaactttactctacgaataatataatctatagtactacaataatatcagtgttttagagaatcatataaatgaacagttagacatggtctaaaggacaattgagtattttgacaacaggactctacagttttatctttttagtgtgcatgtgttctcctttttttttgcaaatagcttcacctatataatacttcatccattttattagtacatccatttagggtttagggttaatggtttttatagactaatttttttagtacatctattttattctattttagcctctaaattaagaaaactaaaactctattttagtttttttatttaataatttagatataaaatagaataaaataaagtgactaaaaattaaacaaataccctttaagaaattaaaaaaactaaggaaacatttttcttgtttcgagtagataatgccagcctgttaaacgccgtcgacgagtctaacggacaccaaccagcgaaccagcagcgtcgcgtcgggccaagcgaagcagacggcacggcatctctgtcgctgcctctggacccctctcgagagttccgctccaccgttggacttgctccgctgtcggcatccagaaattgcgtggcggagcggcagacgtgagccggcacggcaggcggcctcctcctcctctcacggcacggcagctacgggggattcctttcccaccgctccttcgctttcccttcctcgcccgccgtaataaatagacaccccctccacaccctctttccccaacctcgtgttgttcggagcgcacacacacacaaccagatctcccccaaatccacccgtcggcacctccgcttcaaggtacgccgctcgtcctccccccccccccctctctaccttctctagatcggcgttccggtccatggttagggcccggtagttctacttctgttcatgtttgtgttagatccgtgtttgtgttagatccgtgctgctagcgttcgtacacggatgcgacctgtacgtcagacacgttctgattgctaacttgccagtgtttctctttggggaatcctgggatggctctagccgttccgcagacgggatcgatttcatgattttttttgtttcgttgcatagggtttggtttgcccttttcctttatttcaatatatgccgtgcacttgtttgtcgggtcatcttttcatgcttttttttgtcttggttgtgatgatgtggtctggttgggcggtcgttctagatcggagtagaattctgtttcaaactacctggtggatttattaattttggatctgtatgtgtgtgccatacatattcatagttacgaattgaagatgatggatggaaatatcgatctaggataggtatacatgttgatgcgggttttactgatgcatatacagagatgctttttgttcgcttggttgtgatgatgtggtgtggttgggcggtcgttcattcgttctagatcggagtagaatactgtttcaaactacctggtgtatttattaattttggaactgtatgtgtgtgtcatacatcttcatagttacgagtttaagatggatggaaatatcgatctaggataggtatacatgttgatgtgggttttactgatgcatatacatgatggcatatgcagcatctattcatatgctctaaccttgagtacctatctattataataaacaagtatgttttataattattttgatcttgatatacttggatgatggcatatgcagcagctatatgtggatttttttagccctgccttcatacgctatttatttgcttggtactgtttcttttgtcgatgctcaccctgttgtttggtgttacttctgcaggtcgactctagaggatccaacaatgccccagttcgacatcctctgcaagaccccccccaaggtgctcgtgaggcagttcgtggagaggttcgagaggccctccggcgagaagatcgccctctgcgccgccgagctcacctacctctgctggatgatcacccacaacggcaccgccattaagagggccaccttcatgtcatacaacaccatcatctccaactccctctccttcgacatcgtgaacaagtccctccagttcaaatacaagacccagaaggccaccatcctcgaggcctccctcaagaagctcatccccgcctgggagttcaccatcatcccctactacggccagaagcaccagtccgacatcaccgacatcgtgtcatccctccagcttcagttcgagtcctccgaggaggctgacaagggcaactcccactccaagaagatgctgaaggccctcctctccgagggcgagtccatctgggagatcaccgagaagatcctcaactccttcgagtacacctccaggttcactaagaccaagaccctctaccagttcctcttcctcgccaccttcatcaactgcggcaggttctcagacatcaagaacgtggaccccaagtccttcaagctcgtgcagaacaagtacctaggtttgtttctgcttctacctttgatatatatataataattatcattaattagtagtaatataatatttcaaatatttttttcaaaataaaagaatgtagtatatagcaattgcttttctgtagtttataagtgtgtatattttaatttataacttttctaatatatgaccaaaacatggtgatgcctaggtgtcatcatccagtgcctcgtgaccgagaccaagacctccgtgtccaggcacatctacttcttctccgctcgcggcaggatcgaccccctcgtgtacctcgacgagttcctcaggaactcagagcccgtgctcaagagggtgaacaggaccggcaactcctcctccaacaagcaggagtaccagctcctcaaggacaacctcgtgaggtcctacaacaaggccctcaagaagaacgccccctactccatcttcgccatcaagaacggccccaagtcccacatcggtaggcacctcatgacctccttcctctcaatgaagggcctcaccgagctcaccaacgtggtgggcaactggtccgacaagagggcctccgccgtggccaggaccacctacacccaccagatcaccgccatccccgaccactacttcgccctcgtgtcaaggtactacgcctacgaccccatctccaaggagatgatcgccctcaaggacgagactaaccccatcgaggagtggcagcacatcgagcagctcaagggctccgccgagggctccatcaggtaccccgcctggaacggcatcatctcccaggaggtgctcgactacctctcctcctacatcaacaggaggatctgagttaacctagacttgtccatcttctggattggccaacttaattaatgtatgaaataaaaggatgcacacatagtgacatgctaatcactataatgtgggcatcaaagttgtgtgttatgtgtaattactagttatctgaataaaagagaaagagatcatccatatttcttatcctaaatgaatgtcacgtgtctttataattctttgatgaaccagatgcatttcattaaccaaatccatatacatataaatattaatcatatataattaatatcaattgggttagcaaaacaaatctagtctaggtgtgttttgcgaattgcggccgggtaccgagctcgaattcggcccaagtttgtacaaaaaagcaggctccggccagaatggcccggaccgggttaccgaattcgcctagaaggccatttaaatcctgaggatctggtcttcctaaggacccgggatatcggaccgattaaactttaattcggtccgaagcttcgctgaaatcaccagtctctctctacaaatctatctctctctataataatgtgtgagtagttcccagataagggaattagggttcttatagggtttcgctcatgtgttgagcatataagaaacccttagtatgtatttgtatttgtaaaatacttctatcaataaaatttctaattcctaaaaccaaaatccagtggcgagctgctagcaattgcggccagcttggtcagaagttcctattccgaagttcctattctctagaaagtataggaacttcagatccaccgggatccccgatcatgcaaaaactcattaactcagtgcaaaactatgcctggggcagcaaaacggcgttgactgaactttatggtatggaaaatccgtccagccagccgatggccgagctgtggatgggcgcacatccgaaaagcagttcacgagtgcagaatgccgccggagatatcgtttcactgcgtgatgtgattgagagtgataaatcgactctgctcggagaggccgttgccaaacgctttggcgaactgcctttcctgttcaaagtattatgcgcagcacagccactctccattcaggttcatccaaacaaacacaattctgaaatcggttttgccaaagaaaatgccgcaggtatcccgatggatgccgccgagcgtaactataaagatcctaaccacaagccggagctggtttttgcgctgacgcctttccttgcgatgaacgcgtttcgtgaattttccgagattgtctccctactccagccggtcgcaggtgcacatccggcgattgctcactttttacaacagcctgatgccgaacgtttaagcgaactgttcgccagcctgttgaatatgcagggtgaagaaaaatcccgcgcgctggcgattttaaaatcggccctcgatagccagcagggtgaaccgtggcaaacgattcgtttaatttctgaattttacccggaagacagcggtctgttctccccgctattgctgaatgtggtgaaattgaaccctggcgaagcgatgttcctgttcgctgaaacaccgcacgcttacctgcaaggcgtggcgctggaagtgatggcaaactccgataacgtgctgcgtgcgggtctgacgcctaaatacattgatattccggaactggttgccaatgtgaaattcgaagccaaaccggctaaccagttgttgacccagccggtgaaacaaggtgcagaactggacttcccgattccagtggatgattttgccttctcgctgcatgaccttagtgataaagaaaccaccattagccagcagagtgccgccattttgttctgcgtcgaaggcgatgcaacgttgtggaaaggttctcagcagttacagcttaaaccgggtgaatcagcgtttattgccgccaacgaatcaccggtgactgtcaaaggccacggccgtttagcgcgtgtttacaacaagctgtaagagcttactgaaaaaattaacatctcttgctaagctgggggtggaacctagacttgtccatcttctggattggccaacttaattaatgtatgaaataaaaggatgcacacatagtgacatgctaatcactataatgtgggcatcaaagttgtgtgttatgtgtaattactagttatctgaataaaagagaaagagatcatccatatttcttatcctaaatgaatgtcacgtgtctttataattctttgatgaaccagatgcatttcattaaccaaatccatatacatataaatattaatcatatataattaatatcaattgggttagcaaaacaaatctagtctaggtgtgttttgcgaatgcgaccttcttatgtgcttctagtctccaaatgtggttgatagttattttgctctaagatcaacagtaatgaagtataaatcatcgttgtggtgtgctactcggttaattgagcattaacacacacaaacatgacgaggatggtataatctccaaaaatgtgtactttgttaggtgggaccctatagccttgattaatgtgctatgttaggcatgcctggaaacgtgtgacgcatatgttttgtgaacctgttgatattatatgtgcttttatattaccatattttattaaaatactaatatttattactagtaagatataacattctatctagcttaaaaactaaccataaatattccataataactagatttaccaaactaatatactaaatatacataataaatacaaaattaacaagacaataatcaatatttatgagcttaatatatttagacattatggttggtcgacgataatcatgctaacttttcgtaattgcttgattgaaatatgcttagaataatgcctctttgttctacatggcaaatagggaccattatggtgtaacaccctgggaaccacaaacaccccgaaatgctactaaactacacaactaaccttcatatataaaatttcgacagcatctcctttgaaaatttgcatagacgtggaagcaacagagtataaacagatatcatgataagaaaacatactagacattaataatctgctagaaatgggaagaatcctaacttgacgactgcgtaactgactagagtcacacttagctgaccctagtcacttacaactgacttcgtgtcctaggcttaggctactgctagtccgcggtgtatccgtgatcgagttgagcatataagaaacccttagtatgtatttgtatttgtaaaatacttctatcaataaaatttctaattcctaaaaccaaaatccagtggcgagctcgagccagggtgcttcctcaagagtcgacctgcagatgcttcggtcctagcgtatacgaagttcctattccgaagttcctattctccagaaagtataggaacttccccggtccgggcctagaaggccgatctcccgggcacccagctttcttgtacaaagtggccgttaacggatcggccagaatggcccggaccgggttacccggaccgaagcttgcatgcctgcagtgcagcgtgacccggtcgtgcccctctctagagataatgagcattgcatgtctaagttataaaaaattaccacatattttttttgtcacacttgtttgaagtgcagtttatctatctttatacatatatttaaactttactctacgaataatataatctatagtactacaataatatcagtgttttagagaatcatataaatgaacagttagacatggtctaaaggacaattgagtattttgacaacaggactctacagttttatctttttagtgtgcatgtgttctcctttttttttgcaaatagcttcacctatataatacttcatccattttattagtacatccatttagggtttagggttaatggtttttatagactaatttttttagtacatctattttattctattttagcctctaaattaagaaaactaaaactctattttagtttttttatttaataatttagatataaaatagaataaaataaagtgactaaaaattaaacaaataccctttaagaaattaaaaaaactaaggaaacatttttcttgtttcgagtagataatgccagcctgttaaacgccgtcgacgagtctaacggacaccaaccagcgaaccagcagcgtcgcgtcgggccaagcgaagcagacggcacggcatctctgtcgctgcctctggacccctctcgagagttccgctccaccgttggacttgctccgctgtcggcatccagaaattgcgtggcggagcggcagacgtgagccggcacggcaggcggcctcctcctcctctcacggcaccggcagctacgggggattcctttcccaccgctccttcgctttcccttcctcgcccgccgtaataaatagacaccccctccacaccctctttccccaacctcgtgttgttcggagcgcacacacacacaaccagatctcccccaaatccacccgtcggcacctccgcttcaaggtacgccgctcgtcctcccccccccccctctctaccttctctagatcggcgttccggtccatgcatggttagggcccggtagttctacttctgttcatgtttgtgttagatccgtgtttgtgttagatccgtgctgctagcgttcgtacacggatgcgacctgtacgtcagacacgttctgattgctaacttgccagtgtttctctttggggaatcctgggatggctctagccgttccgcagacgggatcgatttcatgattttttttgtttcgttgcatagggtttggtttgcccttttcctttatttcaatatatgccgtgcacttgtttgtcgggtcatcttttcatgcttttttttgtcttggttgtgatgatgtggtctggttgggcggtcgttctagatcggagtagaattctgtttcaaactacctggtggatttattaattttggatctgtatgtgtgtgccatacatattcatagttacgaattgaagatgatggatggaaatatcgatctaggataggtatacatgttgatgcgggttttactgatgcatatacagagatgctttttgttcgcttggttgtgatgatgtggtgtggttgggcggtcgttcattcgttctagatcggagtagaatactgtttcaaactacctggtgtatttattaattttggaactgtatgtgtgtgtcatacatcttcatagttacgagtttaagatggatggaaatatcgatctaggataggtatacatgttgatgtgggttttactgatgcatatacatgatggcatatgcagcatctattcatatgctctaaccttgagtacctatctattataataaacaagtatgttttataattattttgatcttgatatacttggatgatggcatatgcagcagctatatgtggatttttttagccctgccttcatacgctatttatttgcttggtactgtttcttttgtcgatgctcaccctgttgtttggtgttacttctgcaggtcgactttaacttagcctaggatccaccggtcgccaccatggcctcctccgagaacgtcatcaccgagttcatgcgcttcaaggtgcgcatggagggcaccgtgaacggccacgagttcgagatcgagggcgagggcgagggccgcccctacgagggccacaacaccgtgaagctgaaggtgacgaagggcggccccctgcccttcgcctgggacatcctgtccccccagttccagtacggctccaaggtgtacgtgaagcaccccgccgacatccccgactacaagaagctgtccttccccgagggcttcaagtgggagcgcgtgatgaacttcgaggacggcggcgtggcgaccgtgacccaggactcctccctgcaggacggctgcttcatctacaaggtgaagttcatcggcgtgaacttcccctccgacggccccgtgatgcagaagaagaccatgggctgggaggcctccaccgagcgcctgtacccccgcgacggcgtgctgaagggcgagacccacaaggccctgaagctgaaggacggcggccactacctggtggagttcaagtccatctacatggccaagaagcccgtgcagctgcccggctactactacgtggacgccaagctggacatcacctcccacaacgaggactacaccatcgtggagcagtacgagcgcaccgagggccgccaccacctgttcctgtagcggcccatggatattcgaacgcgtaggtaccacatggttaacctagacttgtccatcttctggattggccaacttaattaatgtatgaaataaaaggatgcacacatagtgacatgctaatcactataatgtgggcatcaaagttgtgtgttatgtgtaattactagttatctgaataaaagagaaagagatcatccatatttcttatcctaaatgaatgtcacgtgtctttataattctttgatgaaccagatgcatttcattaaccaaatccatatacatataaatattaatcatatataattaatatcaattgggttagcaaaacaaatctagtctaggtgtgttttgcgaatgcggccgccaccgcggtggagctcgaattccggtccgaagctgggcaactttattatacaaagttgatagataaatcctgaggatctggtcttcctaaggacccgggatatcggaccgattaaactttaattcggtccgacctggtggcgccgctagcgtatacgaagttcctattccgaagttcctattctccagaaagtataggaacttcatcggaccgattaaactttaattcggtccgacctggtggcgccgctagcaaggttgcgcccgccccagcttggtcagccgctccgggcttagaaggccgatctcgcgggcacccagctttcttctacaaagtggccgtttacggatcggctagaatgtcccgcaccggcttaccgatttgcacctcgctaccctgggttcgaccgaagctgaccgatgcttgcgcccgctcgcgaggccggccacactgatagtttaaactgaaggcgggaaacgacaatctgatcatgagcggagaattaagggagtcacgttatgacccccgccgatgacgcgggacaagccgttttacgtttggaactgacagaaccgcaacgattgaaggagccactcagccgcgggtttctggagtttaatgagctaagcacatacgtcagaaaccattattgcgcgttcaaaagtcgcctaaggtcactatcagctagcaaatatttcttgtcaaaaatgctccactgacgttccataaattcccctcggtatccaattagagtctcatattcactctcccggcggatctcgactctagaggatcgctcaggaaggccgctgagatagagccatggcggccaatgcgggcggcggtggagcgggaggaggcagcggcagcggcagcgtggctgcgccggcggtgtgccgccccagcggctcgcggtggacgccgacgccggagcagatcaggatgctgaaggagctctactacggctgcggcatccggtcgcccagctcggagcagatccagcgcatcaccgccatgctgcggcagcacggcaagatcgagggcaagaacgtcttctactggttccagaaccacaaggcccgcgagcgccagaagcgccgcctcaccagcctcgacgtcaacgtgcccgccgccggcgcggccgacgccaccaccagccaactcggcgtcctctcgctgtcgtcgccgccgccttcaggcgcggcgcctccctcgcccaccctcggcttctacgccgccggcaatggcggcggatcggctgtgctgctggacacgagttccgactggggcagcagcggcgctgctatggccaccgagacatgcttcctgcaggactacatgggcgtgacggacacgggcagctcgtcgcagtggccacgcttctcgtcgtcggacacgataatggcggcggccgcggcgcgggcggcgacgacgcgggcgcccgagacgctccctctcttcccgacctgcggcgacgacggcggcagcggtagcagcagctacttgccgttctggggtgccgcgtccacaactgccggcgccacttcttccgttgcgatccaacagcaacaccagctgcaggagcagtacagcttttacagcaacagcaacagcacccagctggccggcaccggcaaccaagacgtatcggcaacagcagcagcagccgccgccctggagctgagcctcagctcatggtgctccccttaccctgctgcagggagtatgtgagagcaacgcgagctgccactgctcttcactgatgtctctggaatggaaggaggaggaagtgagcatagcgttggtgcgttgctgtcaagggcgaattgtaccacatggttaacctagacttgtccatcttctggattggccaacttaattaatgtatgaaataaaaggatgcacacatagtgacatgctaatcactataatgtgggcatcaaagttgtgtgttatgtgtaattactagttatctgaataaaagagaaagagatcatccatatttcttatcctaaatgaatgtcacgtgtctttataattctttgatgaaccagatgcatttcattaaccaaatccatatacatataaatattaatcatatataattaatatcaattgggttagcaaaacaaatctagtctaggtgtgttttgcgggtaccatttaaattgcgcccgccacggccgtggaggtcgtattccggtcagcttgcatccctgcagtgcagcgtgacccggtcgtgcccctctctagagataatgagcattgcatgtctaagttataaaaaattaccacatattttttttgtcacacttgtttgaagtgcagtttatctatctttatacatatatttaaactttactctacgaataatataatctatagtactacaataatatcagtgttttagagaatcatataaatgaacagttagacatggtctaaaggacaattgagtattttgacaacaggactctacagttttatctttttagtgtgcatgtgttctcctttttttttgcaaatagcttcacctatataatacttcatccattttattagtacatccatttagggtttagggttaatggtttttatagactaatttttttagtacatctattttattctattttagcctctaaattaagaaaactaaaactctattttagtttttttatttaataatttagatataaaatagaataaaataaagtgactaaaaattaaacaaataccctttaagaaattaaaaaaactaaggaaacatttttcttgtttcgagtagataatgccagcctgttaaacgccgtcgacgagtctaacggacaccaaccagcgaaccagcagcgtcgcgtcgggccaagcgaagcagacggcacggcatctctgtcgctgcctctggacccctctcgagagttccgctccaccgttggacttgctccgctgtcggcatccagaaattgcgtggcggagcggcagacgtgagccggcacggcaggcggcctcctcctcctctcacggcaccggcagctacgggggattcctttcccaccgctccttcgctttcccttcctcgcccgccgtaataaatagacaccccctccacaccctctttccccaacctcgtgttgttcggagcgcacacacacacaaccagatctcccccaaatccacccgtcggcacctccgcttcaaggtacgccgctcgtcctcccccccccccctctctaccttctctagatcggcgttccggtccatgcatggttagggcccggtagttctacttctgttcatgtttgtgttagatccgtgtttgtgttagatccgtgctgctagcgttcgtacacggatgcgacctgtacgtcagacacgttctgattgctaacttgccagtgtttctctttggggaatcctgggatggctctagccgttccgcagacgggatcgatttcatgattttttttgtttcgttgcatagggtttggtttgcccttttcctttatttcaatatatgccgtgcacttgtttgtcgggtcatcttttcatgcttttttttgtcttggttgtgatgatgtggtctggttgggcggtcgttctagatcggagtagaattctgtttcaaactacctggtggatttattaattttggatctgtatgtgtgtgccatacatattcatagttacgaattgaagatgatggatggaaatatcgatctaggataggtatacatgttgatgcgggttttactgatgcatatacagagatgctttttgttcgcttggttgtgatgatgtggtgtggttgggcggtcgttcattcgttctagatcggagtagaatactgtttcaaactacctggtgtatttattaattttggaactgtatgtgtgtgtcatacatcttcatagttacgagtttaagatggatggaaatatcgatctaggataggtatacatgttgatgtgggttttactgatgcatatacatgatggcatatgcagcatctattcatatgctctaaccttgagtacctatctattataataaacaagtatgttttataattattttgatcttgatatacttggatgatggcatatgcagcagctatatgtggatttttttagccctgccttcatacgctatttatttgcttggtactgtttcttttgtcgatgctcaccctgttgtttggtgttacttctgcaggtcgactctagaggatccatggccactgtgaacaactggctcgctttctccctctccccgcaggagctgccgccctcccagacgacggactccacactcatctcggccgccaccgccgaccatgtctccggcgatgtctgcttcaacatcccccaagattggagcatgaggggatcagagctttcggcgctcgtcgcggagccgaagctggaggacttcctcggcggcatctccttctccgagcagcatcacaaggccaactgcaacatgatacccagcactagcagcacagtttgctacgcgagctcaggtgctagcaccggctaccatcaccagctgtaccaccagcccaccagctcagcgctccacttcgcggactccgtaatggtggcttcctcggccggtgtccacgacggcggtgccatgctcagcgcggccgccgctaacggtgtcgctggcgctgccagtgccaacggcggcggcatcgggctgtccatgattaagaactggctgcggagccaaccggcgcccatgcagccgagggtggcggcggctgagggcgcgcaggggctctctttgtccatgaacatggcggggacgacccaaggcgctgctggcatgccacttctcgctggagagcgcgcacgggcgcccgagagtgtatcgacgtcagcacagggtggagccgtcgtcgtcacggcgccgaaggaggatagcggtggcagcggtgttgccggcgctctagtagccgtgagcacggacacgggtggcagcggcggcgcgtcggctgacaacacggcaaggaagacggtggacacgttcgggcagcgcacgtcgatttaccgtggcgtgacaaggcatagatggactgggagatatgaggcacatctttgggataacagttgcagaagggaagggcaaactcgtaagggtcgtcaagtctatttaggtggctatgataaagaggagaaagctgctagggcttatgatcttgctgctctgaagtactggggtgccacaacaacaacaaattttccagtgagtaactacgaaaaggagctcgaggacatgaagcacatgacaaggcaggagtttgtagcgtctctgagaaggaagagcagtggtttctccagaggtgcatccatttacaggggagtgactaggcatcaccaacatggaagatggcaagcacggattggacgagttgcagggaacaaggatctttacttgggcaccttcagcacccaggaggaggcagcggaggcgtacgacatcgcggcgatcaagttccgcggcctcaacgccgtcaccaacttcgacatgagccgctacgacgtgaagagcatcctggacagcagcgccctccccatcggcagcgccgccaagcgcctcaaggaggccgaggccgcagcgtccgcgcagcaccaccacgccggcgtggtgagctacgacgtcggccgcatcgcctcgcagctcggcgacggcggagccctggcggcggcgtacggcgcgcactaccacggcgccgcctggccgaccatcgcgttccagccgggcgccgccagcacaggcctgtaccacccgtacgcgcagcagccaatgcgcggcggcgggtggtgcaagcaggagcaggaccacgcggtgatcgcggccgcgcacagcctgcaggacctccaccacctgaacctgggcgcggccggcgcgcacgactttttctcggcagggcagcaggccgccgccgctgcgatgcacggcctgggtagcatcgacagtgcgtcgctcgagcacagcaccggctccaactccgtcgtctacaacggcggggtcggcgacagcaacggcgccagcgccgtcggcggcagtggcggtggctacatgatgccgatgagcgctgccggagcaaccactacatcggcaatggtgagccacgagcaggtgcatgcacgggcctacgacgaagccaagcaggctgctcagatggggtacgagagctacctggtgaacgcggagaacaatggtggcggaaggatgtctgcatgggggactgtcgtgtctgcagccgcggcggcagcagcaagcagcaacgacaacatggccgccgacgtcgggcatggcggcgcgcagctcttcagtgtctggaacgacacttaagcgtacgtgccggcctggctctccgaaagggcgtattccagcacactggcggccgttactagacccaacctagacttgtccatcttctggattggccaacttaattaatgtatgaaataaaaggatgcacacatagtgacatgctaatcactataatgtgggcatcaaagttgtgtgttatgtgtaattactagttatctgaataaaagagaaagagatcatccatatttcttatcctaaatgaatgtcacgtgtctttataattctttgatgaaccagatgcatttcattaaccaaatccatatacatataaatattaatcatatataattaatatcaattgggttagcaaaacaaatctagtctaggtgtgttttgcgaattagcttggtcacccggtccgggcctagaaggccagcttcggccgccccgggcaactttattatacaaagttgatagatcgacctgagctgattccgatgacttcgtaggttcctagctcaagccgctcgtgtccaagcgtcacttacgattagctaatgattacggcatctaggaccgactagctaactaactagtacgtagaattgtagaattaattcattccgattaatcgtggcctcttgctcttcaggatgaagagctatgtttaaacgtgcaagcgctactagacaattcagtacattaaaaacgtccgcaatgtgttattaagttgtctaagcgtcaatttgtttacaccacaatatatcctgccaccagccagccaacagctccccgaccggcagctcggcacaaaatcaccactcgatacaggcagcccatcagtccgggacggcgtcagcgggagagccgttgtaaggcggcagactttgctcatgttaccgatgctattcggaagaacggcaactaagctgccgggtttgaaacacggatgatctcgcggagggtagcatgttgattgtaacgatgacagagcgttgctgcctgtgatcaaatatcatctccctcgcagagatccgaattatcagccttcttattcatttctcgcttaaccgtgacaggctgtcgatcttgagaactatgccgacataataggaaatcgctggataaagccgctgaggaagctgagtggcgctatttctttagaagtgaacgttgacgatcgtcgaccgtaccccgatgaattaattcggacgtacgttctgaacacagctggatacttacttgggcgattgtcatacatgacatcaacaatgtacccgtttgtgtaaccgtctcttggaggttcgtatgacactagtggttcccctcagcttgcgactagatgttgaggcctaacattttattagagagcaggctagttgcttagatacatgatcttcaggccgttatctgtcagggcaagcgaaaattggccatttatgacgaccaatgccccgcagaagctcccatctttgccgccatagacgccgcgccccccttttggggtgtagaacatccttttgccagatgtggaaaagaagttcgttgtcccattgttggcaatgacgtagtagccggcgaaagtgcgagacccatttgcgctatatataagcctacgatttccgttgcgactattgtcgtaattggatgaactattatcgtagttgctctcagagttgtcgtaatttgatggactattgtcgtaattgcttatggagttgtcgtagttgcttggagaaatgtcgtagttggatggggagtagtcatagggaagacgagcttcatccactaaaacaattggcaggtcagcaagtgcctgccccgatgccatcgcaagtacgaggcttagaaccaccttcaacagatcgcgcatagtcttccccagctctctaacgcttgagttaagccgcgccgcgaagcggcgtcggcttgaacgaattgttagacattatttgccgactaccttggtgatctcgcctttcacgtagtgaacaaattcttccaactgatctgcgcgcgaggccaagcgatcttcttgtccaagataagcctgcctagcttcaagtatgacgggctgatactgggccggcaggcgctccattgcccagtcggcagcgacatccttcggcgcgattttgccggttactgcgctgtaccaaatgcgggacaacgtaagcactacatttcgctcatcgccagcccagtcgggcggcgagttccatagcgttaaggtttcatttagcgcctcaaatagatcctgttcaggaaccggatcaaagagttcctccgccgctggacctaccaaggcaacgctatgttctcttgcttttgtcagcaagatagccagatcaatgtcgatcgtggctggctcgaagatacctgcaagaatgtcattgcgctgccattctccaaattgcagttcgcgcttagctggataacgccacggaatgatgtcgtcgtgcacaacaatggtgacttctacagcgcggagaatctcgctctctccaggggaagccgaagtttccaaaaggtcgttgatcaaagctcgccgcgttgtttcatcaagccttacagtcaccgtaaccagcaaatcaatatcactgtgtggcttcaggccgccatccactgcggagccgtacaaatgtacggccagcaacgtcggttcgagatggcgctcgatgacgccaactacctctgatagttgagtcgatacttcggcgatcaccgcttccctcatgatgtttaactcctgaattaagccgcgccgcgaagcggtgtcggcttgaatgaattgttaggcgtcatcctgtgctcccgagaaccagtaccagtacatcgctgtttcgttcgagacttgaggtctagttttatacgtgaacaggtcaatgccgccgagagtaaagccacattttgcgtacaaattgcaggcaggtacattgttcgtttgtgtctctaatcgtatgccaaggagctgtctgcttagtgcccactttttcgcaaattcgatgagactgtgcgcgactcctttgcctcggtgcgtgtgcgacacaacaatgtgttcgatagaggctagatcgttccatgttgagttgagttcaatcttcccgacaagctcttggtcgatgaatgcgccatagcaagcagagtcttcatcagagtcatcatccgagatgtaatccttccggtaggggctcacacttctggtagatagttcaaagccttggtcggataggtgcacatcgaacacttcacgaacaatgaaatggttctcagcatccaatgtttccgccacctgctcagggatcaccgaaatcttcatatgacgcctaacgcctggcacagcggatcgcaaacctggcgcggcttttggcacaaaaggcgtgacaggtttgcgaatccgttgctgccacttgttaacccttttgccagatttggtaactataatttatgttagaggcgaagtcttgggtaaaaactggcctaaaattgctggggatttcaggaaagtaaacatcaccttccggctcgatgtctattgtagatatatgtagtgtatctacttgatcgggggatctgctgcctcgcgcgtttcggtgatgacggtgaaaacctctgacacatgcagctcccggagacggtcacagcttgtctgtaagcggatgccgggagcagacaagcccgtcagggcgcgtcagcgggtgttggcgggtgtcggggcgcagccatgacccagtcacgtagcgatagcggagtgtatactggcttaactatgcggcatcagagcagattgtactgagagtgcaccatatgcggtgtgaaataccgcacagatgcgtaaggagaaaataccgcatcaggcgctcttccgcttcctcgctcactgactcgctgcgctcggtcgttcggctgcggcgagcggtatcagctcactcaaaggcggtaatacggttatccacagaatcaggggataacgcaggaaagaacatgtgagcaaaaggccagcaaaaggccaggaaccgtaaaaaggccgcgttgctggcgtttttccataggctccgcccccctgacgagcatcacaaaaatcgacgctcaagtcagaggtggcgaaacccgacaggactataaagataccaggcgtttccccctggaagctccctcgtgcgctctcctgttccgaccctgccgcttaccggatacctgtccgcctttctcccttcgggaagcgtggcgctttctcatagctcacgctgtaggtatctcagttcggtgtaggtcgttcgctccaagctgggctgtgtgcacgaaccccccgttcagcccgaccgctgcgccttatccggtaactatcgtcttgagtccaacccggtaagacacgacttatcgccactggcagcagccactggtaacaggattagcagagcgaggtatgtaggcggtgctacagagttcttgaagtggtggcctaactacggctacactagaaggacagtatttggtatctgcgctctgctgaagccagttaccttcggaaaaagagttggtagctcttgatccggcaaacaaaccaccgctggtagcggtggtttttttgtttgcaagcagcagattacgcgcagaaaaaaaggatctcaagaagatcctttgatcttttctacggggtctgacgctcagtggaacgaaaactcacgttaagggattttggtcatgagattatcaaaaaggatcttcacctagatccttttaaattaaaaatgaagttttaaatcaatctaaagtatatatgagtaaacttggtctgacagttaccaatgcttaatcagtgaggcacctatctcagcgatctgtctatttcgttcatccatagttgcctgactccccgtcgtgtagataactacgatacgggagggcttaccatctggccccagtgctgcaatgataccgcgagacccacgctcaccggctccagatttatcagcaataaaccagccagccggaagggccgagcgcagaagtggtcctgcaactttatccgcctccatccagtctattaattgttgccgggaagctagagtaagtagttcgccagttaatagtttgcgcaacgttgttgccattgctgca

SEQ ID NO: 37 - DNA, 16293 bp, Artificial Sequence
  Synthetic construct comprising the T-DNA (RB to LB):  RB+GM-SAMS PRO-GM-SAMS UTR-GM SAMS INTRON1-GM-SAMS UTR2-FRT1:CAMV35S PRO:HYG:NOS TERM+GM-UBQ PRO-GM-UBQ 5UTR:ZS-YELLOW:NOS TERM-FRT87+LB
agttgtgatccatgtttctaaatgccgcatggcgcgttgtagaattacgtttgtagcaatgctcagcaatctttgtcatcaaacggagacatctagtttgcatttctgtcgtgcgcggtttggtcgaaatcttgccgaaatgcccgtgtagtgagagaaaattaaagagtggagtctagcaaatacaacctttacgtgtataaattctgttgagctgcaaatggctggccaggagcctagattgagaggtgaaccgttgaaacacgttcttgtcatcgatgacgatgtcgctatgcggcatcttatagtcgagtatcttacgatccatgcctttaaggtgactgcggtagccgacagcaagcagttcaatcgtgtactctgctccgagacggtcgatgtcgtggtcgtcgatcttaatttgggtcgcgaagatgggcttgaaattgttcgtagtctggccacgaagtccgatgttccaatcataattattagcggcgctcgcctcgaagaggcggacaaagttattgcgctcgagttgggagcaaccgattttattgccaagccttttgggacgcgggaatttctggcgcgcatccgtgttgcgttacgcgtgcggcccagtgtcgcgcgaaccaaagatcgacgctcatttagtttcgctgactggacacttaatctcaggcgacgccgcttgatttcggaagagggcagtgaggtgaaactcacggcaggtgagtttaatctcctggttgctttcctggagaagccgcgcgacgtcctatcccgggagcagcttctgatcgccagtcgggtacgcgaggaggaggtgtatgacagaagtattgatgtcctcattttgcggctgcgccggaagcttgagggggacccgacgacccctcagttaatcaagactgcaagaggtgctggctatttctttgacgctgacgtggatgtttcgtacgggggtgtgatggcggcctgaggtagaggtgcatttcgcctttagcaatctgttcccaacgtgagcagattgctatgcggcttggcaaagctgcctttcctcggtactatccgagcggccggccgcatcgtaattttaagacgcagtctattatttccaaaggaattaagaagctgttctccagcataaaatttgaaaacagaatgatgtctgaagcacttgccgccctgccacaacaagacaaagctaaaaacaattgcgaacatcttattcaaatgaagacaggtgtgacgcggagctggtgcaaactaatacattccgaatggatgaccttcgaatccgtcgtaagcggctgcgttaactcgagggaatttctgttcttgtcggcgtgcatggatgagatactcctgagcgatcccatgaatcaacttatcctccatatctgcgtcaagctgcaatagcatatcggatgtgatctggttctggctagcaaacaacatggcatatcgatatccatcgatctctttcagtatgggcctcagccgaggctctttccaaagatcaaccaactcttggataatagaaaggccagcagcagggcgtaacatctgcttaactctggccttggccacgttcatgaaggtctcctcgtctgctaactcgtggcgaataatatgccaacgaaaatccgcactccaataactgctttgcgccatgcacttgagcaacgagatagatcctccctcaagaataagcccgccgtgggcctcataattatacacctcccccatcagcctttcatgagcttgcttggctgcgatgatacccttcaccagaggccgatcatcaaggtatagacggctcgttcctttcagttcttccactgttggtcgtccgcttccggttgacagctgaggacaacattggacccgatcgagcgaaaggactggaagcccagtctgctgggcaagagctaccgcggtcgacgtctttcctgtgcaagttggaccgaaaattagacgcagatccataagttttttgcggtatcttgaatacaaattgactttttggattagagaagtgtactaccagaggcggttatattgcctcctcgagattccttattgaagagcaactggctttaccgtctccccaaagggcaatttgtttttcaacaaagtgtggggcatggctgtctccttgaaagcaatttgtcactaacgagggcacccttaagtcaaataaggctgactaaatcagcaatacagaggcagctattcatgccactcggggacgtttttccgcactttactgccacttgtctgcgctgattacaccattgctggcgacagagtgagatcttcgatcccgcgaaattaatacgactcactatagggagaccacaacggtttccctctagaaataattttgtttaactttaagaaggagatatacccatggaaaagcctgaactcaccgcgacgtctgtcgagaagtttctgatcgaaaagttcgacagcgtctccgacctgatgcagctctcggagggcgaagaatctcgtgctttcagcttcgatgtaggagggcgtggatatgtcctgcgggtaaatagctgcgccgatggtttctacaaagatcgttatgtttatcggcactttgcatcggccgcgctcccgattccggaagtgcttgacattggggaattcagcgagagcctgacctattgcatctcccgccgtgcacagggtgtcacgttgcaagacctgcctgaaaccgaactgcccgctgttctgcagccggtcgcggaggctatggatgcgatcgctgcggccgatcttagccagacgagcgggttcggcccattcggaccgcaaggaatcggtcaatacactacatggcgtgatttcatatgcgcgattgctgatccccatgtgtatcactggcaaactgtgatggacgacaccgtcagtgcgtccgtcgcgcaggctctcgatgagctgatgctttgggccgaggactgccccgaagtccggcacctcgtgcacgcggatttcggctccaacaatgtcctgacggacaatggccgcataacagcggtcattgactggagcgaggcgatgttcggggattcccaatacgaggtcgccaacatcttcttctggaggccgtggttggcttgtatggagcagcagacgcgctacttcgagcggaggcatccggagcttgcaggatcgccgcggctccgggcgtatatgctccgcattggtcttgaccaactctatcagagcttggttgacggcaatttcgatgatgcagcttgggcgcagggtcgatgcgacgcaatcgtccgatccggagccgggactgtcgggcgtacacaaatcgcccgcagaagcgcggccgtctggaccgatggctgtgtagaagtactcgccgatagtggaaaccgacgccccagcactcgtccgagggcaaaggaatagtgaggtacagcttggatcgatccggctgctaacaaagcccgaaaggaagctgagttggctgctgccaccgctgagcaataactagcataaccccttggggcctctaaacgggtcttgaggggttttttgctgaaaggaggaactatatccggatgatcgggcgcgagatcttttgtaatgtaaccaactagtgcgctcttccgcttcctcgctcactgactcgctgcgctcggtcgttcggctgcggcgagcggtatcagctcactcaaaggcggtaatacggttatccacagaatcaggggataacgcaggaaagaacatgtgagcaaaaggccagcaaaaggccaggaaccgtaaaaaggccgcgttgctggcgtttttccataggctccgcccccctgacgagcatcacaaaaatcgacgctcaagtcagaggtggcgaaacccgacaggactataaagataccaggcgtttccccctggaagctccctcgtgcgctctcctgttccgaccctgccgcttaccggatacctgtccgcctttctcccttcgggaagcgtggcgctttctcatagctcacgctgtaggtatctcagttcggtgtaggtcgttcgctccaagctgggctgtgtgcacgaaccccccgttcagcccgaccgctgcgccttatccggtaactatcgtcttgagtccaacccggtaagacacgacttatcgccactggcagcagccactggtaacaggattagcagagcgaggtatgtaggcggtgctacagagttcttgaagtggtggcctaactacggctacactagaaggacagtatttggtatctgcgctctgctgaagccagttaccttcggaaaaagagttggtagctcttgatccggcaaacaaaccaccgctggtagcggtggtttttttgtttgcaagcagcagattacgcgcagaaaaaaaggatctcaagaagatcctttgatcttttctacggggtctgacgctcagtggaacgaaaactcacgttaagggattttggtcatgagattatcaaaaaggatcttcacctagatccttttaaattaaaaatgaagcgtacgttggaatcgcttctacaaaactcacagaaacaatcaaacaaacatacacagcgatttattcacacgaacccgaattacaacggtatatatcctgtcagccaacaccaaaacatcaaaaaaatcgggatcaggatcaggatctgcggccgcatcctgcaggtcgactctagaggatcctcatcgctatcaactttgtatagaaaagttgggccgaattcgtttctcactagacgcggtgaaattacctaattaacaccggtgtttaaacactagtaacggccgccagtgtgctggaattcgcccttcccaagctttgctctagatcaaactcacatccaaacataacatggatatcttccttaccaatcatactaattattttgggttaaatattaatcattatttttaagatattaattaagaaattaaaagattttttaaaaaaatgtataaaattatattattcatgatttttcatacatttgattttgataataaatatattttttttaatttcttaaaaaatgttgcaagacacttattagacatagtcttgttctgtttacaaaagcattcatcatttaatacattaaaaaatatttaatactaacagtagaatcttcttgtgagtggtgtgggagtaggcaacctggcattgaaacgagagaaagagagtcagaaccagaagacaaataaaaagtatgcaacaaacaaatcaaaatcaaagggcaaaggctggggttggctcaattggttgctacattcaattttcaactcagtcaacggttgagattcactctgacttccccaatctaagccgcggatgcaaacggttgaatctaacccacaatccaatctcgttacttaggggcttttccgtcattaactcacccctgccacccggtttccctataaattggaactcaatgctcccctctaaactcgtatcgcttcagagttgagaccaagacacactcgttcatatatctctctgctcttctcttctcttctacctctcaaggtacttttcttctccctctaccaaatcctagattccgtggttcaatttcggatcttgcacttctggtttgctttgccttgctttttcctcaactgggtccatctaggatccatgtgaaactctactctttctttaatatctgcggaatacgcgtttgactttcagatctagtcgaaatcatttcataattgcctttctttcttttagcttatgagaaataaaatcactttttttttatttcaaaataaaccttgggccttgtgctgactgagatggggtttggtgattacagaattttagcgaattttgtaattgtacttgtttgtctgtagttttgttttgttttcttgtttctcatacattccttaggcttcaattttattcgagtataggtcacaataggaattcaaactttgagcaggggaattaatcccttccttcaaatccagtttgtttgtatatatgtttaaaaaatgaaacttttgctttaaattctattataactttttttatggctgaaatttttgcatgtgtctttgctctctgttgtaaatttactgtttaggtactaactctaggcttgttgtgcagtttttgaagtataacaacagaagttcctattccgaagttcctattctctagaaagtataggaacttccactagaggatccaattccaatcccacaaaaatctgagcttaacagcacagttgctcctctcagagcagaatcgggtattcaacaccctcatatcaactactacgttgtgtataacggtccacatgccggtatatacgatgactggggttgtacaaaggcggcaacaaacggcgttcccggagttgcacacaagaaatttgccactattacagaggcaagagcagcagctgacgcgtacacaacaagtcagcaaacagacaggttgaacttcatccccaaaggagaagctcaactcaagcccaagagctttgctaaggccctaacaagcccaccaaagcaaaaagcccactggctcacgctaggaaccaaaaggcccagcagtgatccagccccaaaagagatctcctttgccccggagattacaatggacgatttcctctatctttacgatctaggaaggaagttcgaaggtgaaggtgacgacactatgttcaccactgataatgagaaggttagcctcttcaatttcagaaagaatgctgacccacagatggttagagaggcctacgcagcaggtctcatcaagacgatctacccgagtaacaatctccaggagatcaaataccttcccaagaaggttaaagatgcagtcaaaagattcaggactaattgcatcaagaacacagagaaagacatatttctcaagatcagaagtactattccagtatggacgattcaaggcttgcttcataaaccaaggcaagtaatagagattggagtctctaaaaaggtagttcctactgaatctaaggccatgcatggagtctaagattcaaatcgaggatctaacagaactcgccgtgaagactggcgaacagttcatacagagtcttttacgactcaatgacaagaagaaaatcttcgtcaacatggtggagcacgacactctggtctactccaaaaatgtcaaagatacagtctcagaagaccaaagggctattgagacttttcaacaaaggataatttcgggaaacctcctcggattccattgcccagctatctgtcacttcatcgaaaggacagtagaaaaggaaggtggctcctacaaatgccatcattgcgataaaggaaaggctatcattcaagatgcctctgccgacagtggtcccaaagatggacccccacccacgaggagcatcgtggaaaaagaagacgttccaaccacgtcttcaaagcaagtggattgatgtgacatctccactgacgtaagggatgacgcacaatcccactatccttcgcaagacccttcctctatataaggaagttcatttcatttggagaggacacgctcgagctcatttctctattacttcagccataacaaaagaactcttttctcttcttattaaaccatgaaaaagcctgaactcaccgcgacgtctgtcgagaagtttctgatcgaaaagttcgacagcgtctccgacctgatgcagctctcggagggcgaagaatctcgtgctttcagcttcgatgtaggagggcgtggatatgtcctgcgggtaaatagctgcgccgatggtttctacaaagatcgttatgtttatcggcactttgcatcggccgcgctcccgattccggaagtgcttgacattggggaattcagcgagagcctgacctattgcatctcccgccgtgcacagggtgtcacgttgcaagacctgcctgaaaccgaactgcccgctgttctgcagccggtcgcggaggccatggatgcgatcgctgcggccgatcttagccagacgagcgggttcggcccattcggaccgcaaggaatcggtcaatacactacatggcgtgatttcatatgcgcgattgctgatccccatgtgtatcactggcaaactgtgatggacgacaccgtcagtgcgtccgtcgcgcaggctctcgatgagctgatgctttgggccgaggactgccccgaagtccggcacctcgtgcacgcggatttcggctccaacaatgtcctgacggacaatggccgcataacagcggtcattgactggagcgaggcgatgttcggggattcccaatacgaggtcgccaacatcttcttctggaggccgtggttggcttgtatggagcagcagacgcgctacttcgagcggaggcatccggagcttgcaggatcgccgcggctccgggcgtatatgctccgcattggtcttgaccaactctatcagagcttggttgacggcaatttcgatgatgcagcttgggcgcagggtcgatgcgacgcaatcgtccgatccggagccgggactgtcgggcgtacacaaatcgcccgcagaagcgcggccgtctggaccgatggctgtgtagaagtactcgccgatagtggaaaccgacgccccagcactcgtccgagggcaaaggaatagtgaggtacctaaagaaggagtgcgtcgaagcagatcgttcaaacatttggcaataaagtttcttaagattgaatcctgttgccggtcttgcgatgattatcatataatttctgttgaattacgttaagcatgtaataattaacatgtaatgcatgacgttatttatgagatgggtttttatgattagagtcccgcaattatacatttaatacgcgatagaaaacaaaatatagcgcgcaaactaggataaattatcgcgcgcggtgtcatctatgttactagatcgatgtcgacccgggtgattgcggttacatcatgtacggaaaaataattctaatccttgatttaaatttgaacttgactatttatttattctttatttcattttgtaaatcattttatgtatctcctggcaagcaattttatccaccttgcaccaacaccttcgggttccataatcaaaccaccttaacttcacaccatgctgtaactcacaccgcccagcatctccaatgtgaaagaagctaaaatttaataaacaatcatacgaagcagtgacaaaataccagatggtattaatgcttcgataaaattaattggaaagtataaaatggtagaaaataataaattataattaatttaagtaagataaaaaataattaaaaactaaaatgttaaaattttaaaaaaattattttaaataatatttaaaaacattaaaaatcattttaaaaaatttatttatagaacaattaaataaatatttcagctaataaaaaacaaaagcttacctagccttagaagacaacttgtccaacaattagatgatacccattgcccttacgttttctttaacatcaattattgtttttgtcaacaagctatcttttagttttattttattggtaaaaaatatgtcgccttcaagttgcatcatttaacacatctcgtcattagaaaaataaaactcttccctaaacgattagtagaaaaaatcattcgataataaataagaaagaaaaattagaaaaaaataacttcattttaaaaaaatcattaaggctatattttttaaatgactaattttatatagactgtaactaaaagtatacaatttattatgctatgtatcttaaagaattacttataaaaatctacggaagaatatcttacaaagtgaaaaacaaatgagaaagaatttagtgggatgattatgattttatttgaaaattgaaaaaataattattaaagactttagtggagtaagaaagctttcctattagtcttttcttatccataaaaaaaaaaaaaaaaatctagcgtgacagcttttccatagattttaataatgtaaaatactggtagcagccgaccgttcaggtaatggacactgtggtcctaacttgcaacgggtgcgggcccaatttaataacgccgtggtaacggataaagccaagcgtgaagcggtgaaggtacatctctgactccgtcaagattacgaaaccgtcaactacgaaggactccccgaaatatcatctgtgtcataaacaccaagtcacaccatacatgggcacgcgtcacaatatgattggagaacggttccaccgcatatgctataaaatgcccccacacccctcgaccctaatcgcacttcaattgcaatcaaattagttcattctctttgcgcagttccctacctctcctttcaaggttcgtagatttcttccgtttttttttcttcttctttattgtttgttctacatcagcatgatgttgatttgattgtgttttctatcgtttcatcgattataaattttcataatcagaagattcagcttttattaatgcaagaacgtccttaattgatgattttataaccgtaaattaggtctaattagagtttttttcataaagattttcagatccgtttacaacaagccttaattgttgattctgtagtcgtagattaaggtttttttcatgaactacttcagatccgttaaacaacagccttatttgttgatacttcagtcgtttttcaagaaattgttcagatccgttgataaaagccttattcgttgattctgtatggtatttcaagagatattgctcaggtcctttagcaactaccttatttgttgattctgtggccatagattaggattttttttcacgaaattgcttcttgaaattacgtgatggattttgattctgatttatcttgtgattgttgactctacagccatggcccacagcaagcacggcctgaaggaggagatgaccatgaagtaccacatggagggctgcgtgaacggccacaagttcgtgatcaccggcgagggcatcggctaccccttcaagggcaagcagaccatcaacctgtgcgtgatcgagggcggccccctgcccttcagcgaggacatcctgagcgccggcttcaagtacggcgaccggatcttcaccgagtacccccaggacatcgtggactacttcaagaacagctgccccgccggctacacctggggccggagcttcctgttcgaggacggcgccgtgtgcatctgtaacgtggacatcaccgtgagcgtgaaggagaactgcatctaccacaagagcatcttcaacggcgtgaacttccccgccgacggccccgtgatgaagaagatgaccaccaactgggaggccagctgcgagaagatcatgcccgtgcctaagcagggcatcctgaagggcgacgtgagcatgtacctgctgctgaaggacggcggccggtaccggtgccagttcgacaccgtgtacaaggccaagagcgtgcccagcaagatgcccgagtggcacttcatccagcacaagctgctgcgggaggaccggagcgacgccaagaaccagaagtggcagctgaccgagcacgccatcgccttccccagcgccctggcctgagagctcgaatttccccgatcgttcaaacatttggcaataaagtttcttaagattgaatcctgttgccggtcttgcgatgattatcatataatttctgttgaattacgttaagcatgtaataattaacatgtaatgcatgacgttatttatgagatgggtttttatgattagagtcccgcaattatacatttaatacgcgatagaaaacaaaatatagcgcgcaaactaggataaattatcgcgcgcggtgtcatctatgttactagatcgggaattctagtggccggcccagctgatgatcccggtgaagttcctattccgaagttcctattctccagaaagtataggaacttcactagagcttgcggccgcgcatgctgacttaatcagctaacgccactcgactctagaggtccgggcaactttattatacaaagttgatagattgtatgaattcatttacaattgaatatatcctgccattttacacctcgatatatcctgccacaaattccatgtacacagtacattaaaaacgtccgcaatgtgttattaagttgtctaagcgtcaatttgtttacaccacaatatatcctgccaccagccagccaacagctccccgaccggcagctcggcacaaaatcaccactcgatacaggcagcccatcagtccactagagggcccgccgagaatgaacgccaagaggaacaagcatgaaaccgcaccaggacggccaggacgaaccgtttttcattaccgaagagatcgaggcggagatgatcgcggccgggtacgtgttcgagccgcccgcgcacgtctcaaccgtgcggctgcatgaaatcctggccggtttgtctgatgccaagctgggcggcctggccgcccagcttggccgctgaagaaaccgagcgccgccgtctaaaaaggtgatgtgtatttgagtaaaacagcttgcgtcatgcggtcgctgcgtatatgatgcgatgagtaaataaacaaatacgcaaggggaacgcatgaaggttatcgctgtacttaaccagaaaggcgggtcaggcaagacgaccatcgcaacccatctagcccgcgccctgcaactcgccggggccgatgttctgttagtcgattccgatccccagggcagtgcccgcgattgggcggccgtgcgggaagatcaaccgctaaccgttgtcggcatcgaccgcccgacgattgaccgcgacgtgaaggccatcggccggcgcgacttcgtagtgatcgacggagcgccccaggcggcggacttggctgtgtccgcgatcaaggcagccgacttcgtgctgattccggtgcagccaagcccttacgacatatgggccaccgccgacctggtggagctggttaagcagcgcattgaggtcacggatggaaggctacaagcggcctttgtcgtgtcgcgggcgatcaaaggcacgcgcatcggcggtgaggttgccgaggcgctggccgggtacgagctgcccattcttgagtcccgtatcacgcagcgcgtgagctacccaggcactgccgccgccggcacaaccgttcttgaatcagaacccgagggcgacgctgcccgcgaggtccaggcgctggccgctgaaattaaatcaaaactcatttgagttaatgaggtaaagagaaaatgagcaaaagcacaaacacgctaagtgccggccgtccgagcgcacgcagcagcaaggctgcaacgttggccagcctcgcagacacgccagccatgaagcgggtcaactttcagttgccggcggaggatcacaccaagctgaagatgtacgcggtacgccaaggcaagaccattaccgagctgctatctgaatacatcgcgcagctaccagagtaaatgagcaaatgaataaatgagtagatgaattttagcggctaaaggaggcggcatggaaaatcaagaacaaccaggcaccgacgccgtggaatgccccatgtgtggaggaacgggcggttggccaggcgtaagcggctgggttgcctgccggccctgcaatggcactggaacccccaagcccgaggaatcggcgtgagcggtcgcaaaccatccggcccggtacaaatcggcgcggcgctgggtgatgacctggtggagaagttgaaggcagcgcaggccgcccagcggcaacgcatcgaggcagaagcacgccccggtgaatcgtggcaagcagccgctgatcgaatccgcaaagaatcccggcaaccgccggcagccggtgcgccgtcgattaggaagccgcccaagggcgacgagcaaccagattttttcgttccgatgctctatgacgtgggcacccgcgatagtcgcagcatcatggacgtggccgttttccgtctgtcgaagcgtgaccgacgagctggcgaggtgatccgctacgagcttccagacgggcacgtagaggtttccgcagggccggcaggcatggccagtgtgtgggattacgacctggtactgatggcggtttcccatctaaccgaatccatgaaccgataccgggaagggaagggagacaagcccggccgcgtgttccgtccacacgttgcggacgtactcaagttctgccggcgagccgatggcggaaagcagaaagacgacctggtagaaacctgcattcggttaaacaccacgcacgttgccatgcagcgtacgaagaaggccaagaacggccgcctggtgacggtatccgagggtgaagccttgattagccgctacaagatcgtaaagagcgaaaccgggcggccggagtacatcgagatcgagctagctgattggatgtaccgcgagatcacagaaggcaagaacccggacgtgctgacggttcaccccgattactttttgatcgatcccggcatcggccgttttctctaccgcctggcacgccgcgccgcaggcaaggcagaagccagatggttgttcaagacgatctacgaacgcagtggcagcgccggagagttcaagaagttctgtttcaccgtgcgcaagctgatcgggtcaaatgacctgccggagtacgatttgaaggaggaggcggggcaggctggcccgatcctagtcatgcgctaccgcaacctgatcgagggcgaagcatccgccggttcctaatgtacggagcagatgctagggcaaattgccctagcaggggaaaaaggtcgaaaaggtctctttcctgtggatagcacgtacattgggaacccaaagccgtacattgggaaccggaacccgtacattgggaacccaaagccgtacattgggaaccggtcacacatgtaagtgactgatataaaagagaaaaaaggcgatttttccgcctaaaactctttaaaacttattaaaactcttaaaacccgcctggcctgtgcataactgtctggccagcgcacagccgaagagctgcaaaaagcgcctacccttcggtcgctgcgctccctacgccccgccgcttcgcgtcggcctatgcatataattgtggtttcaaaatcggctccgtcgatactatgttatacgccaactctgaaaacaactttgaaaaagctgttttctggtatttaaggttttagaatgcaaggaacagtgaattggagttcgtcttgttataattagcttcttgggggatctttaaatactgtagaaaagaggaaggaaataataaatggctaaaatgagaatatcaccggaattgaaaaaactgatcgaaaaataccgctgcgtaaaagatacggaaggaatgtctcctgctaaggtatataagctggtgggagaaaatgaaaacctatatttaaaaatgacggacagccggtataaagggaccacctatgatgtggaacgggaaaaggacatgatgctatggctggaaggaaagctgcctgttccaaaggtcctgcactttgaacggcatgatggctggagcaatctgctcatgagtgaggccgatggcgtcctttgctcggaagagtatgaagatgaacaaagccctgaaaagattatcgagctgtatgcggagtgcatcaggctctttcactccatcgacatatcggattgtccctatacgaatagcttagacagccgcttagccgaattggattacttactgaataacgatctggccgatgtggattgcgaaaactgggaagaagacactccatttaaagatccgcgcgagctgtatgattttttaaagacggaaaagcccgaagaggaacttgtcttttcccacggcgacctgggagacagcaacatctttgtgaaagatggcaaagtaagtggctttattgatcttgggagaagcggcagggcggacaagtggtatgacattgccttctgcgtccggtcgatcagggaggatatcggggaagaacagtatgtcgagctattttttgacttactggggatcaagcctgattgggagaaaataaaatattatattttactggatgaattgttttagtacctagatacttcgctcgtgaaaagcagcgctcagggggctagcttggaagatcgcaccctgattgacatgctcgcaaccgcagttgatgtcatcgtacccttccgtgcccacggtgacatttacgaggtgggcgaaatctggctcgctgccgatgcgcgtcggcgcggtgagacaataggcgatcttcttaaccagcagt

SEQ ID NO: 38 - DNA, 18836 bp, Artificial Sequence
  Synthetic construct comprising the T-DNA (RB to LB): RB+AT-UBIQ10 PRO:FLP:UBQ3TERM+FRT1-CTP-SPCN:UBQ10 TERM++GM-MYH11:DS-RED:PINII-FRT87+LB
ttatcaaaaaggatcttcacctagatccttttaaattaaaaatgaagcgtacgttggaatcgcttctacaaaactcacagaaacaatcaaacaaacatacacagcgatttattcacacgaacccgaattacaacggtatatatcctgtcagccaacaccaaaacatcaaaaaaatcgggatcaggatcaggatctgcggccgcatcctgcaggagctcaaacgagcaggaagcaacgagagggtggcgcgcgaccgacgtgcgtacgtagcatgagcctgagtggagacgttggacgtgtatgtatatacctctctgcgtgttaactatgtacgtaagcggcaggcagtgcaataagtgtggctctgtagtatgtacgtgcgggtacgatgctgtaagctactgaggcaagtccataaataaataatgacacgtgcgtgttctataatctcttcgcttcttcatttgtccccttgcggagtttggcatccattgatgccgttacgctgagaacagacacagcagacgaaccaaaagtgagttcttgtatgaaactatgacccttcatcgctaggctcaaacagcaccccgtacgaacacagcaaattagtcatctaactattagcccctacatgtttcagacgatacataaatatagcccatccttagcaattagctattggccctgcccatcccaagcaatgatctcgaagtatttttaatatatagtatttttaatatgtagcttttaaaattagaagataattttgagacaaaaatctccaagtatttttttgggtattttttactgcctccgtttttctttatttctcgtcacctagtttaattttgtgctaatcggctataaacgaaacagagagaaaagttactctaaaagcaactccaacagattagatataaatcttatatcctgcctagagctgttaaaaagatagacaactttagtggattagtgtatgcaacaaactctccaaatttaagtatcccaactacccaacgcatatcgttcccttttcattggcgcacgaactttcacctgctatagccgacgtacatgttcgttttttttgggcggcgcttactttcttccccgttcgttctcagcatcgcaactcaatttgttatggcggagaagcccttgtatcccaggtagtaatgcacagatatgcattattattattcataaaaaccggtccggaatcggacctcgggacgtcgccaaagttagctaggtgtccttagcgtttcttaggttctaggcgttaggggtcaataggttagcctagaagtcccgcactaacagcctagcttaacagttccaagctaagccactagactagccctatccgactaacctagtctaagccgaacggggatctaatctaagctaggcacccattagactagttcactagcgcgaccgcactaaactaggctaaaggttaatagcaactagttagctaggggacgttagctgccctcactagctagctgctaatgcagtcgacgggcccggtgatagtttggttacagcttgcatgcctgcaggtttaaacagtcgactctagatatctcgacccatcaggatattcttgtttaagatgttgaactctatggaggtttgtatgaactgatgatctaggaccggataagttcccttcttcatagcgaacttattcaaagaatgttttgtgtatcattcttgttacattgttattaatgaaaaaatattattggtcattggactgaacacgagtgttaaatatggaccaggccccaaataagatccattgatatatgaattaaataacaagaataaatcgagtcaccaaaccacttgccttttttaacgagacttgttcaccaacttgatacaaaagtcattatcctatgcaaatcaataatcatacaaaaatatccaataacactaaaaaattaaaagaaatggataatttcacaatatgttatacgataaagaagttacttttccaagaaattcactgattttataagcccacttgcattagataaatggcaaaaaaaaacaaaaaggaaaagaaataaagcacgaagaattctagaaaatacgaaatacgcttcaatgcagtgggacccacggttcaattattgccaattttcagctccaccgtatatttaaaaaataaaacgataatgctaaaaaaatataaatcgtaacgatcgttaaatctcaacggctggatcttatgacgaccgttagaaattgtggttgtcgacgagtcagtaataaacggcgtcaaagtggttgcagccggcacacacgagtcgtgtttatcaactcaaagcacaaatacttttcctcaacctaaaaataaggcaattagccaaaaacaactttgcgtgtaaacaacgctcaatacacgtgtcattttattattagctattgcttcaccgccttagctttctcgtgacctagtcgtcctcgtcttttcttcttcttcttctataaaacaatacccaaagagctcttcttcttcacaattcagatttcaatttctcaaaatcttaaaaactttctctcaattctctctaccgtgatcaaggtaaatttctgtgttccttattctctcaaaatcttcgattttgttttcgttcgatcccaatttcgtatatgttctttggtttagattctgttaatcttagatcgaagacgattttctgggtttgatcgttagatatcatcttaattctcgattagggtttcatagatatcatccgatttgttcaaataatttgagttttgtcgaataattactcttcgatttgtgatttctatctagatctggtgttagtttctagtttgtgcgatcgaatttgtcgattaatctgagtttttctgattaacaggggatccaccatgcctaaaaagaagaggaaagttatgccccagttcgacatcctctgcaagaccccccccaaggtgctcgtgaggcagttcgtggagaggttcgagaggccctccggcgagaagatcgccctctgcgccgccgagctcacctacctctgctggatgatcacccacaacggcaccgccattaagagggccaccttcatgtcatacaacaccatcatctccaactccctctccttcgacatcgtgaacaagtccctccagttcaaatacaagacccagaaggccaccatcctcgaggcctccctcaagaagctcatccccgcctgggagttcaccatcatcccctactacggccagaagcaccagtccgacatcaccgacatcgtgtcatccctccagcttcagttcgagtcctccgaggaggctgacaagggcaactcccactccaagaagatgctgaaggccctcctctccgagggcgagtccatctgggagatcaccgagaagatcctcaactccttcgagtacacctccaggttcactaagaccaagaccctctaccagttcctcttcctcgccaccttcatcaactgcggcaggttctcagacatcaagaacgtggaccccaagtccttcaagctcgtgcagaacaagtacctaggtttgtttctgcttctacctttgatatatatataataattatcattaattagtagtaatataatatttcaaatatttttttcaaaataaaagaatgtagtatatagcaattgcttttctgtagtttataagtgtgtatattttaatttataacttttctaatatatgaccaaaacatggtgatgcctaggtgtcatcatccagtgcctcgtgaccgagaccaagacctccgtgtccaggcacatctacttcttctccgctcgcggcaggatcgaccccctcgtgtacctcgacgagttcctcaggaactcagagcccgtgctcaagagggtgaacaggaccggcaactcctcctccaacaagcaggagtaccagctcctcaaggacaacctcgtgaggtcctacaacaaggccctcaagaagaacgccccctactccatcttcgccatcaagaacggccccaagtcccacatcggtaggcacctcatgacctccttcctctcaatgaagggcctcaccgagctcaccaacgtggtgggcaactggtccgacaagagggcctccgccgtggccaggaccacctacacccaccagatcaccgccatccccgaccactacttcgccctcgtgtcaaggtactacgcctacgaccccatctccaaggagatgatcgccctcaaggacgagactaaccccatcgaggagtggcagcacatcgagcagctcaagggctccgccgagggctccatcaggtaccccgcctggaacggcatcatctcccaggaggtgctcgactacctctcctcctacatcaacaggaggatctgagttaacttttgtgatctgatgataagtggttggttcgtgtctcatgcacttgggaggtgatctatttcacctggtgtagtttgtgtttccgtcagttggaaaaacttatccctatcgatttcgttttcattttctgcttttcttttatgtaccttcgtttgggcttgtaacgggcctttgtatttcaactctcaataataatccaagtgcatgttaaacaatttgtcatctgtttcggctttgatatactactggtgaagatgggccgtactactgcatcacaacgaaaaataataataagatgaaaaacttgaagtggaaaaaaaaaaaaacttgaatgttcactactactcattgaccataatgtttaacatacatagctcaatagtatttttgtgaatatggcaacacaaacagtccaaaacaattgtctcttactataccaaaccaagggcgccgcttgtttgccactctttgtgtgcaatagtgtgattaccacatctccacattcaatatattccctgaattatctgacgattttgatggctcactgttttcccaagtcttgaattgtcttctgtgcgccagtcaaatgcatatgtgttgagtttatcttttaaatatcaagcttttgtttttaacttttgtttgtaaccaaaaactcacagtaggagtttgatcacataattttatgtttgcctttgcaatttctagtgagtctttgattaaaagcttgaaaagaaaatgcagccaagcttaccaagtaagttatgtgtattaaccagaggaagagagaatcttgcaaaatttcaacaaacacaaaaagaagtattactacgattggtggagaaagaaaacgattccaaatcttgaactgttgttgtaaaagcatagcagaaagtgggagacaaccgaaatagaaatgactataacttaatttaatgttatcattataatttcttctagcaaatatttagaaagtaaatatcacatcaacctttaatgtaattaagctttctctttttgattcatgtgagatgaaaagaaaaaaaagaagagaaaagtgtagaaaacacatcatttctaagctgaagagatctagaagttcctattccgaagttcctattctctagaaagtataggaacttcgcgaatggctgcaactactcttacatctgctttacctggtgctttcagttcatcccagagaccaagtgctcctttcaacttacaaagatcacctagagtgcttagaaggttcaacagaaagacaggacgtcaacctcgtggacttgttcgtgctgcaaaggctcaagcggcgcaaaacctgccagagaaattcgatgaaacaagactctgggaggccctcaggggatttggggttagtccaagtagggttacttacgctcccgtcggattcggagattaccactggaccgtcacagatgaagacgggagaccttggttcgcaactgtcagtgacctcgaacacaaagagcattgcgggcagggagcacaagcagcccttaaaggactcagacaagctatggacactgccctcgcacttagagatagggacggactcagattcgtggttgctccagtggcagcaacagatgggggtggccctgtccttccccttgacgctaggtatgcactcacagtcttccctcacgtcccaggaagaacaggagagttcggacaaagactcacagaggcagagagggacagactgcttgctcttctggcagaactccacggaagaacacctcctgaaacaaccccaccagccgatatggaaccaccaggacttcctggtgttagagcagcactcgccgaaagtgaaggaccttggagtggaggaccatttgcagaacccgctagacttcttctcagagaacacgaggccacactgcacgcaagactcgctgaattcgaagccctcgtcgcaagagttaagggtcgtggagcacctcttgtcgttacccacggagaaccacacccaggcaacttgatcctcggagaggaaggctatctcctcgtggactgggatacagttggactggctccagctgaaagggatttgagtctcatctcagacgacccagctgacctcgcaagatacgcagagcttacaggaagaactccagacccagacgcactcgcactctatagactgcgttggagtctccttgatgtggctgagttcgtcgagtggttcagggctgaacaccaaagaacccaagacaccgagagtgcatggaaggggttcactgacacacttgggcaattggctgctggtggatcagctgcatagcctaggctcgtctctgttatgcttaagaagttcaatgtttcgtttcatgtaaaactttggtggtttgtgttttggggccttgtataatccctgatgaataagtgttctactatgtttccgttcctgttatctctttctttctaatgacaagtcgaacttcttctttatcatcgcttcgtttttattatctgtgcttcttttgtttaatacgcctgcaaagtgactcgactctgtttagtgcagttctgcgaaacttgtaaatagtccaattgttggcctctagtaatagatgtagcgaaagtgttgagctgttgggttctaaggatggcttgaacatgttaatcttttaggttctgagtatgatgaacattcgttgttgctaagaaatgcctgtaatgtcccacaaatgtagaaaatggttcgtacctttgtccaagcattgatatgtctgatgagaggaaactgcaagatactgagcttggtttaacgaaggagaggcagtttcttccttccaaagcatttcatttgacaatgccttgatcatcttaagtagagtttctgttgtggaaagtttgaaactttgaagaaacgactctcaagtaaattgatgatcacaagtgaaagtgtatgttacataagtggatatttcaccctttttccatcaatcaaaacatcatatagtaatccattggtttatacaaacatcaaaatacatttacctctgaaatgaggaaaaaaatgcaaagagatttttgaaaatttccaacaaatggagagaaaaaaaaaaaacaaagaattaaatcaatcagtacatttataaaggttatgagacctatatgacacttattggtcaagtggcagccattccatttctagctctaattctggtaccgcagtactgaattcgtgaaatggaacgtgtgtgatgggtacaagttgcttgtggtgtatcatgtatgagtataaaatttagctcaaataacttatcattgaacggacttagttatacttttttttttttttatctttctaatacatatatttcgttgttataaaagtagaaatgttcgatttctgtaaaattatcgttgatttttcttccacgtaaaataaaattaaaatatgttatatttttagaacataacaagattcgtgtaaatttaaatttgtgagaatttctaaaaatcaattaaaaatcatcacaaattacagaaaaaccatcataaattatagaataaaaataaatacaaatacaaattatgatggtttttaacctcaaacttaaatcttaaatatatttttaacctttaaagatatgattttttggagggcaaaaatatgacctttcttcaaagtagtccatttgtttgtatttattattaattgtaaatattatttttagcaccaaaatatcttggcataaaattaaaacacacattttttttctaaggtaaacattaaaaaaagaactcattccaaaaaagtaacatgtttcaaaaaatccaaaaacatttaaattttaaaataattctagtaatagtatttatatttaatattaaaactcacaaataaatgagattgcccgttttatataaaattgggatgagtaaatatgtatgatacaattatataaggacaattaagtataattatgtgtgcatgttaaagttgatttaattaaataagatgcgtaaattattataacttttttttaacatttatacttgctaacacaccccatattcacatgataataggaggcatctctaatgagttgatatttttacacgagagtgatgagtaagtttgaattatgcaatcataaatagtaaaatttaacaatcaatatttatttaccttatttgtaagtgaaaaaaaatatttgtatatatattataatttaaagtataaatgaatttaaatgaaatattaggctgtgaaattaatcataagattcacaaataagaatctagatgaattaattaatacccatagtgaaaaatagtggtctcattaagaaaaaaattgaaaactcaagtttatgttgtgcacttttgctatgtaagagagaggaaaggattaaaatgaaatgagcaagctttataaaaaaatataaatttaaaaaaaaaaaaaaaaaaaaagcacgaggtagagtagaatgattgcatgagtggcacatggtgacaaattcgagacagatattttcacacctttccatcacatcaactctcccccgttgatcatcatttaatatctcatccaacggcaaacaaacgtacattttagaacataccagaaaatccctctctctcatcaatccacccaagtgatgaaaacgacgtcgacgtgggagaagatccgcaaacggattagacgcgtcgtcagatttcgacacgtgtacggtggatgtttcggactctctcccctcaaccgctttataaattggggtcgtggcttcgccttgaaactcgttctagtgtatgtgattgttgtgactcgttcttcttcgtcgttatcttcttcttttgttgtttgtgtgtttgttttttctctcacctgtaaggatccgccatggcctcctccgagaacgtcatcaccgagttcatgcgcttcaaggtgcgcatggagggcaccgtgaacggccacgagttcgagatcgagggcgagggcgagggccgcccctacgagggccacaacaccgtgaagctgaaggtgacgaagggcggccccctgcccttcgcctgggacatcctgtccccccagttccagtacggctccaaggtgtacgtgaagcaccccgccgacatccccgactacaagaagctgtccttccccgagggcttcaagtgggagcgcgtgatgaacttcgaggacggcggcgtggcgaccgtgacccaggactcctccctgcaggacggctgcttcatctacaaggtgaagttcatcggcgtgaacttcccctccgacggccccgtgatgcagaagaagaccatgggctgggaggcctccaccgagcgcctgtacccccgcgacggcgtgctgaagggcgagacccacaaggccctgaagctgaaggacggcggccactacctggtggagttcaagtccatctacatggccaagaagcccgtgcagctgcccggctactactacgtggacgccaagctggacatcacctcccacaacgaggactacaccatcgtggagcagtacgagcgcaccgagggccgccaccacctgttcctgtagctagacttgtccatcttctggattggccaacttaattaatgtatgaaataaaaggatgcacacatagtgacatgctaatcactataatgtgggcatcaaagttgtgtgttatgtgtaattactagttatctgaataaaagagaaagagatcatccatatttcttatcctaaatgaatgtcacgtgtctttataattctttgatgaaccagatgcatttcattaaccaaatccatatacatataaatattaatcatatataattaatatcaattgggttagcaaaacaaatctagtctaggtgtgttttgcgcgactaattaactagctgtcccacggcctaactagcacttaatcccctagcctaacctaagagcgctaatctaggctagtggtcacttagggctttaagtgcggccgcggaagttcctattccgaagttcctattctccagaaagtataggaacttcaagcttctaactaactaggacgtcccgaggtccgattccgggctaattaacacctagctcgccactcgactaattagggactaagcctagcgcttagccgttaaaacctagcacaccctaagcacccttagttaggttcccctcttaattaagccctagtgagcccctaagttaaggggacgctaagagccccctaacctagtattcggctagaggcgaactaggctaaacacctaagcgcacctctttaagctagatcgctagggggctaggctagagcttcgctagattagtctaagggcaggttaacggccgaaacgtgcaagcgctactagacaattcagtacattaaaaacgtccgcaatgtgttatctagctagctaagcgtcaatttatttacaattgaatatatcctgccaccagccagccaacagctccccgaccggcagctcggcacaaaatcaccactcgatacaggcagcccatcagtccgggacggcgtcagcgggagagccgttgtaaggcggcagactttgctcatgttaccgatgctattcggaagaacggcaactaagctgccgggtttgaaacacggatgatctcgcggagggtagcatgttgattgtaacgatgacagagcgttgctgcctgtgatcaaatatcatctccctcgcagagatccgaattatcagccttcttattcatttctcgcttaaccgtgacaggcgcgcgcggtgccacctgggtccttttcatcacgtgctataaaaataattataatttaaattttttaatataaatatataaattaaaaatagaaagtaaaaaaagaaattaaagaaaaaatagtttttgttttccgaagatgtaaaagactctagggggatcgccaacaaatactaccttttatcttgctcttcctgctctcaggtattaatgccgaattgtttcatcttgtctgtgtagaagaccacacacgaaaatcctgtgattttacattttacttatcgttaatcgaatgtatatctatttaatctgcttttcttgtctaataaatatatatgtaaagtacgctttttgttgaaattttttaaacctttgtttatttttttttcttcattccgtaactcttctaccttctttatttactttctaaaatccaaatacaaaacataaaaataaataaacacagagtaaattcccaaattattccatcattaaaagatacgaggcgcgtgtaagttacaggcaagcgatccgtcctaagaaaccattattatcatgacattaacctataaaaataggcgtatcacgaggccctttcgtctcgcgcgtttcggtgatgacggtgaaaacctctgacacatgcagctcccggagacggtcacagcttgtctgtaagcggatgccgggagcagacaagcccgtcagggcgcgtcagcgggtgttggcgggtgtcggggctggcttaactatgcggcatcagagcagattgtactgagagtgcaccataccacagcttttcaattcaattcatcattttttttttattcttttttttgatttcggtttctttgaaatttttttgattcggtaatctccgaacagaaggaagaacgaaggaaggagcacagacttagattggtatatatacgcatatgtagtgttgaagaaacatgaaattgcccagtattcttaacccaactgcacagaacaaaaacctgcaggaaacgaagataaatcatgtcgaaagctacatataaggaacgtgctgctactcatcctagtcctgttgctgccaagctatttaatatcatgcacgaaaagcaaacaaacttgtgtgcttcattggatgttcgtaccaccaaggaattactggagttagttgaagcattaggtcccaaaatttgtttactaaaaacacatgtggatatcttgactgatttttccatggagggcacagttaagccgctaaaggcattatccgccaagtacaattttttactcttcgaagacagaaaatttgctgacattggtaatacagtcaaattgcagtactctgcgggtgtatacagaatagcagaatgggcagacattacgaatgcacacggtgtggtgggcccaggtattgttagcggtttgaagcaggcggcagaagaagtaacaaaggaacctagaggccttttgatgttagcagaattgtcatgcaagggctccctatctactggagaatatactaagggtactgttgacattgcgaagagcgacaaagattttgttatcggctttattgctcaaagagacatgggtggaagagatgaaggttacgattggttgattatgacacccggtgtgggtttagatgacaagggagacgcattgggtcaacagtatagaaccgtggatgatgtggtctctacaggatctgacattattattgttggaagaggactatttgcaaagggaagggatgctaaggtagagggtgaacgttacagaaaagcaggctgggaagcatatttgagaagatgcggccagcaaaactaaaaaactgtattataagtaaacgcgcgcgggcgcgcctaaaacagcttgcgtcatgcggtcgctgcgtatatgatgcgatgagtaaataaacaaatacgcaaggggaacgcatgaaggttatcgctgtacttaaccagaaaggcgggtcaggcaagacgaccatcgcaacccatctagcccgcgccctgcaactcgccggggccgatgttctgttagtcgattccgatccccagggcagtgcccgcgattgggcggccgtgcgggaagatcaaccgctaaccgttgtcggcatcgaccgcccgacgattgaccgcgacgtgaaggccatcggccggcgcgacttcgtagtgatcgacggagcgccccaggcggcggacttggctgtgtccgcgatcaaggcagccgacttcgtgctgattccggtgcagccaagcccttacgacatatgggccaccgccgacctggtggagctggttaagcagcgcattgaggtcacggatggaaggctacaagcggcctttgtcgtgtcgcgggcgatcaaaggcacgcgcatcggcggtgaggttgccgaggcgctggccgggtacgagctgcccattcttgagtcccgtatcacgcagcgcgtgagctacccaggcactgccgccgccggcacaaccgttcttgaatcagaacccgagggcgacgctgcccgcgaggtccaggcgctggccgctgaaattaaatcaaaactcatttgagttaatgaggtaaagagaaaatgagcaaaagcacaaacacgctaagtgccggccgtccgagcgcacgcagcagcaaggctgcaacgttggccagcctcgcagacacgccagccatgaagcgggtcaactttcagttgccggcggaggatcacaccaagctgaagatgtacgcggtacgccaaggcaagaccattaccgagctgctatctgaatacatcgcgcagctaccagagtaaatgagcaaatgaataaatgagtagatgaattttagcggctaaaggaggcggcatggaaaatcaagaacaaccaggcaccgacgccgtggaatgccccatgtgtggaggaacgggcggttggccaggcgtaagcggctgggttgcctgccggccctgcaatggcactggaacccccaagcccgaggaatcggcgtgagcggtcgcaaaccatccggcccggtacaaatcggcgcggcgctgggtgatgacctggtggagaagttgaaggcagcgcaggccgcccagcggcaacgcatcgaggcagaagcacgccccggtgaatcgtggcaagcagccgctgatcgaatccgcaaagaatcccggcaaccgccggcagccggtgcgccgtcgattaggaagccgcccaagggcgacgagcaaccagattttttcgttccgatgctctatgacgtgggcacccgcgatagtcgcagcatcatggacgtggccgttttccgtctgtcgaagcgtgaccgacgagctggcgaggtgatccgctacgagcttccagacgggcacgtagaggtttccgcagggccggcaggcatggccagtgtgtgggattacgacctggtactgatggcggtttcccatctaaccgaatccatgaaccgataccgggaagggaagggagacaagcccggccgcgtgttccgtccacacgttgcggacgtactcaagttctgccggcgagccgatggcggaaagcagaaagacgacctggtagaaacctgcattcggttaaacaccacgcacgttgccatgcagcgtacgaagaaggccaagaacggccgcctggtgacggtatccgagggtgaagccttgattagccgctacaagatcgtaaagagcgaaaccgggcggccggagtacatcgagatcgagctagctgattggatgtaccgcgagatcacagaaggcaagaacccggacgtgctgacggttcaccccgattactttttgatcgatcccggcatcggccgttttctctaccgcctggcacgccgcgccgcaggcaaggcagaagccagatggttgttcaagacgatctacgaacgcagtggcagcgccggagagttcaagaagttctgtttcaccgtgcgcaagctgatcgggtcaaatgacctgccggagtacgatttgaaggaggaggcggggcaggctggcccgatcctagtcatgcgctaccgcaacctgatcgagggcgaagcatccgccggttcctaatgtacggagcagatgctagggcaaattgccctagcaggggaaaaaggtcgaaaaggtctctttcctgtggatagcacgtacattgggaacccaaagccgtacattgggaaccggaacccgtacattgggaacccaaagccgtacattgggaaccggtcacacatgtaagtgactgatataaaagagaaaaaaggcgatttttccgcctaaaactctttaaaacttattaaaactcttaaaacccgcctggcctgtgcataactgtctggccagcgcacagccgaagagctgcaaaaagcgcctacccttcggtcgctgcgctccctacgccccgccgcttcgcgtcggcctatggcgcgccggaaaatatgcatggcatgcccgttccatacagaagctgggcgaacaaacgatgctcgccttccagaaaaccgaggatgcgaaccacttcatccggggtcagcaccaccggcaagcgccgcgacggccgaggtcttccgatctcctgaagccagggcagatccgtgcacagcaccttgccgtagaagaacagcaaggccgccaatgcctgacgatgcgtggagaccgaaaccttgcgctcgttcgccagccaggacagaaatgcctcgacttcgctgctgcccaaggttgccgggtgacgcacaccgtggaaacggatgaaggcacgaacccagtggacataagcctgttcggttcgtaagctgtaatgcaagtagcgtatgcgctcacgcaactggtccagaaccttgaccgaacgcagcggtggtaacggcgcagtggcggttttcatggcttgttatgactgtttttttggggtacagtctatgcctcgggcatccaagcagcaagcgcgttacgccgtgggtcgatgtttgatgttatggagcagcaacgatgttacgcagcagggcagtcgccctaaaacaaagttaaacatcatgagggaagcggtgatcgccgaagtatcgactcaactatcagaggtagttggcgtcatcgagcgccatctcgaaccgacgttgctggccgtacatttgtacggctccgcagtggatggcggcctgaagccacacagtgatattgatttgctggttacggtgacggtaaggcttgatgaaacaacgcggcgagctttgatcaacgaccttttggaaacttcggcttcccctggagagagcgagattctccgcgctgtagaagtcaccattgttgtgcacgacgacatcattccgtggcgttatccagctaagcgcgaactgcaatttggagaatggcagcgcaatgacattcttgcaggtatcttcgagccagccacgatcgacattgatctggctatcttgctgacaaaagcaagagaacatagcgttgccttggtaggtccagcggcggaggaactctttgatccggttcctgaacaggatctatttgaggcgctaaatgaaaccttaacgctatggaactcgccgcccgactgggctggcgatgagcgaaatgtagtgcttacgttgtcccgcatttggtacagcgcagtaaccggcaaaatcgcgccgaaggatgtcgctgccgactgggcaatggagcgcctgccggcccagtatcagcccgtcatacttgaagctagacaggcttatcttggacaagaagaagatcgcttggcctcgcgcgcagatcagttggaagaatttgtccactacgtgaaaggcgagatcaccaaggtagtcggcaaataatgtctaacaattcgttcaagccgacgccgcttcgcggcgcggcttaactcaagcgttagatgcactatacgtaaccaactagtaggaacagtgaattggagttcgtcttgttataattagcttcttgggggatctttaaatactgtagaaaagaggaaggaaataataaatggctaaaatgagaatatcaccggaattgaaaaaactgatcgaaaaataccgctgcgtaaaagatacggaaggaatgtctcctgctaaggtatataagctggtgggagaaaatgaaaacctatatttaaaaatgacggacagccggtataaagggaccacctatgatgtggaacgggaaaaggacatgatgctatggctggaaggaaagctgcctgttccaaaggtcctgcactttgaacggcatgatggctggagcaatctgctcatgagtgaggccgatggcgtcctttgctcggaagagtatgaagatgaacaaagccctgaaaagattatcgagctgtatgcggagtgcatcaggctctttcactccatcgacatatcggattgtccctatacgaatagcttagacagccgcttagccgaattggattacttactgaataacgatctggccgatgtggattgcgaaaactgggaagaagacactccatttaaagatccgcgcgagctgtatgattttttaaagacggaaaagcccgaagaggaacttgtcttttcccacggcgacctgggagacagcaacatctttgtgaaagatggcaaagtaagtggctttattgatcttgggagaagcggcagggcggacaagtggtatgacattgccttctgcgtccggtcgatcagggaggatatcggggaagaacagtatgtcgagctattttttgacttactggggatcaagcctgattgggagaaaataaaatattatattttactggatgaattgttttagtacctagatacttcgctcgtgaaaagcagcgctcagggggctagtgcgctcttccgcttcctcgctcactgactcgctgcgctcggtcgttcggctgcggcgagcggtatcagctcactcaaaggcggtaatacggttatccacagaatcaggggataacgcaggaaagaacatgtgagcaaaaggccagcaaaaggccaggaaccgtaaaaaggccgcgttgctggcgtttttccataggctccgcccccctgacgagcatcacaaaaatcgacgctcaagtcagaggtggcgaaacccgacaggactataaagataccaggcgtttccccctggaagctccctcgtgcgctctcctgttccgaccctgccgcttaccggatacctgtccgcctttctcccttcgggaagcgtggcgctttctcatagctcacgctgtaggtatctcagttcggtgtaggtcgttcgctccaagctgggctgtgtgcacgaaccccccgttcagcccgaccgctgcgccttatccggtaactatcgtcttgagtccaacccggtaagacacgacttatcgccactggcagcagccactggtaacaggattagcagagcgaggtatgtaggcggtgctacagagttcttgaagtggtggcctaactacggctacactagaagaacagtatttggtatctgcgctctgctgaagccagttaccttcggaaaaagagttggtagctcttgatccggcaaacaaaccaccgctggtagcggtggtttttttgtttgcaagcagcagattacgcgcagaaaaaaaggatctcaagaagatcctttgatcttttctacggggtctgacgctcagtggaacgaaaactcacgttaagggattttggtcatgag

SEQ ID NO: 39 - DNA, 19032 bp, Artificial Sequence
  Synthetic construct comprising the T-DNA (RB to LB): RB+GM-EF1A2PRO:FLP:UBQ10 TERM+FRT1-CTP-SPCN:UBQ3 TERM++GM-MYH11PRO:DS-RED:PINII-FRT87+LB
attatcaaaaaggatcttcacctagatccttttaaattaaaaatgaagcgtacgttggaatcgcttctacaaaactcacagaaacaatcaaacaaacatacacagcgatttattcacacgaacccgaattacaacggtatatatcctgtcagccaacaccaaaacatcaaaaaaatcgggatcaggatcaggatctgcggccgcatcctgcaggagctcaaacgagcaggaagcaacgagagggtggcgcgcgaccgacgtgcgtacgtagcatgagcctgagtggagacgttggacgtgtatgtatatacctctctgcgtgttaactatgtacgtaagcggcaggcagtgcaataagtgtggctctgtagtatgtacgtgcgggtacgatgctgtaagctactgaggcaagtccataaataaataatgacacgtgcgtgttctataatctcttcgcttcttcatttgtccccttgcggagtttggcatccattgatgccgttacgctgagaacagacacagcagacgaaccaaaagtgagttcttgtatgaaactatgacccttcatcgctaggctcaaacagcaccccgtacgaacacagcaaattagtcatctaactattagcccctacatgtttcagacgatacataaatatagcccatccttagcaattagctattggccctgcccatcccaagcaatgatctcgaagtatttttaatatatagtatttttaatatgtagcttttaaaattagaagataattttgagacaaaaatctccaagtatttttttgggtattttttactgcctccgtttttctttatttctcgtcacctagtttaattttgtgctaatcggctataaacgaaacagagagaaaagttactctaaaagcaactccaacagattagatataaatcttatatcctgcctagagctgttaaaaagatagacaactttagtggattagtgtatgcaacaaactctccaaatttaagtatcccaactacccaacgcatatcgttcccttttcattggcgcacgaactttcacctgctatagccgacgtacatgttcgttttttttgggcggcgcttactttcttccccgttcgttctcagcatcgcaactcaatttgttatggcggagaagcccttgtatcccaggtagtaatgcacagatatgcattattattattcataaaaaccggtccggaatcggacctcgggacgtcgccaaagttagctaggtgtccttagcgtttcttaggttctaggcgttaggggtcaataggttagcctagaagtcccgcactaacagcctagcttaacagttccaagctaagccactagactagccctatccgactaacctagtctaagccgaacggggatctaatctaagctaggcacccattagactagttcactagcgcgaccgcactaaactaggctaaaggttaatagcaactagttagctaggggacgttagctgccctcactagctagctgctaatgcagtcgacgggcccggtgatagtttggttacagcttgcatgcctgcaggtttaaacagtcgactctagatatctcgacccgggtttacttattttgtgggtatctatacttttattagatttttaatcaggctcctgatttctttttatttcgattgaattcctgaacttgtattattcagtagatcgaataaattataaaaagataaaatcataaaataatattttatcctatcaatcatattaaagcaatgaatatgtaaaattaatcttatctttattttaaaaaatcatataggtttagtatttttttaaaaataaagataggattagttttactattcactgcttattacttttaaaaaaatcataaaggtttagtatttttttaaaataaatataggaatagttttactattcactgctttaatagaaaaatagtttaaaatttaagatagttttaatcccagcatttgccacgtttgaacgtgagccgaaacgatgtcgttacattatcttaacctagctgaaacgatgtcgtcataatatcgccaaatgccaactggactacgtcgaacccacaaatcccacaaagcgcgtgaaatcaaatcgctcaaaccacaaaaaagaacaacgcgtttgttacacgctcaatcccacgcgagtagagcacagtaaccttcaaataagcgaatggggcataatcagaaatccgaaataaacctaggggcattatcggaaatgaaaagtagctcactcaatataaaaatctaggaaccctagttttcgttatcactctgtgctccctcgctctatttctcagtctctgtgtttgcggctgaggattccgaacgagtgaccttcttcgtttctcgcaaaggtaacagcctctgctcttgtctcttcgattcgatctatgcctgtctcttatttacgatgatgtttcttcggttatgtttttttatttatgctttatgctgttgatgttcggttgtttgtttcgctttgtttttgtggttcagttttttaggattcttttggtttttgaatcgattaatcggaagagattttcgagttatttggtgtgttggaggtgaatcttttttttgaggtcatagatctgttgtatttgtgttataaacatgcgactttgtatgattttttacgaggttatgatgttctggttgttttattatgaatctgttgagacagaaccatgatttttgttgatgttcgtttacactattaaaggtttgttttaacaggattaaaagttttttaagcatgttgaaggagtcttgtagatatgtaaccgtcgatagtttttttgtgggtttgttcacatgttatcaagcttaatcttttactatgtatgcgaccatatctggatccagcaaaggcgattttttaattccttgtgaaacttttgtaatatgaagttgaaattttgttattggtaaactataaatgtgtgaagttggagtatacctttaccttcttatttggctttgtgatagtttaatttatatgtattttgagttctgacttgtatttctttgaattgattctagtttaagtaatcgggatccaccatgcctaaaaagaagaggaaagttatgccccagttcgacatcctctgcaagaccccccccaaggtgctcgtgaggcagttcgtggagaggttcgagaggccctccggcgagaagatcgccctctgcgccgccgagctcacctacctctgctggatgatcacccacaacggcaccgccattaagagggccaccttcatgtcatacaacaccatcatctccaactccctctccttcgacatcgtgaacaagtccctccagttcaaatacaagacccagaaggccaccatcctcgaggcctccctcaagaagctcatccccgcctgggagttcaccatcatcccctactacggccagaagcaccagtccgacatcaccgacatcgtgtcatccctccagcttcagttcgagtcctccgaggaggctgacaagggcaactcccactccaagaagatgctgaaggccctcctctccgagggcgagtccatctgggagatcaccgagaagatcctcaactccttcgagtacacctccaggttcactaagaccaagaccctctaccagttcctcttcctcgccaccttcatcaactgcggcaggttctcagacatcaagaacgtggaccccaagtccttcaagctcgtgcagaacaagtacctaggtttgtttctgcttctacctttgatatatatataataattatcattaattagtagtaatataatatttcaaatatttttttcaaaataaaagaatgtagtatatagcaattgcttttctgtagtttataagtgtgtatattttaatttataacttttctaatatatgaccaaaacatggtgatgcctaggtgtcatcatccagtgcctcgtgaccgagaccaagacctccgtgtccaggcacatctacttcttctccgctcgcggcaggatcgaccccctcgtgtacctcgacgagttcctcaggaactcagagcccgtgctcaagagggtgaacaggaccggcaactcctcctccaacaagcaggagtaccagctcctcaaggacaacctcgtgaggtcctacaacaaggccctcaagaagaacgccccctactccatcttcgccatcaagaacggccccaagtcccacatcggtaggcacctcatgacctccttcctctcaatgaagggcctcaccgagctcaccaacgtggtgggcaactggtccgacaagagggcctccgccgtggccaggaccacctacacccaccagatcaccgccatccccgaccactacttcgccctcgtgtcaaggtactacgcctacgaccccatctccaaggagatgatcgccctcaaggacgagactaaccccatcgaggagtggcagcacatcgagcagctcaagggctccgccgagggctccatcaggtaccccgcctggaacggcatcatctcccaggaggtgctcgactacctctcctcctacatcaacaggaggatctgagttaacctcgtctctgttatgcttaagaagttcaatgtttcgtttcatgtaaaactttggtggtttgtgttttggggccttgtataatccctgatgaataagtgttctactatgtttccgttcctgttatctctttctttctaatgacaagtcgaacttcttctttatcatcgcttcgtttttattatctgtgcttcttttgtttaatacgcctgcaaagtgactcgactctgtttagtgcagttctgcgaaacttgtaaatagtccaattgttggcctctagtaatagatgtagcgaaagtgttgagctgttgggttctaaggatggcttgaacatgttaatcttttaggttctgagtatgatgaacattcgttgttgctaagaaatgcctgtaatgtcccacaaatgtagaaaatggttcgtacctttgtccaagcattgatatgtctgatgagaggaaactgcaagatactgagcttggtttaacgaaggagaggcagtttcttccttccaaagcatttcatttgacaatgccttgatcatcttaagtagagtttctgttgtggaaagtttgaaactttgaagaaacgactctcaagtaaattgatgatcacaagtgaaagtgtatgttacataagtggatatttcaccctttttccatcaatcaaaacatcatatagtaatccattggtttatacaaacatcaaaatacatttacctctgaaatgaggaaaaaaatgcaaagagatttttgaaaatttccaacaaatggagagaaaaaaaaaaaacaaagaattaaatcaatcagtacatttataaaggttatgagacctatatgacacttattggtcaagtggcagccattccatttctagctctaattctggtaccgcagatctagaagttcctattccgaagttcctattctctagaaagtataggaacttcgcgaatggctgcaactactcttacatctgctttacctggtgctttcagttcatcccagagaccaagtgctcctttcaacttacaaagatcacctagagtgcttagaaggttcaacagaaagacaggacgtcaacctcgtggacttgttcgtgctgcaaaggctcaagcggcgcaaaacctgccagagaaattcgatgaaacaagactctgggaggccctcaggggatttggggttagtccaagtagggttacttacgctcccgtcggattcggagattaccactggaccgtcacagatgaagacgggagaccttggttcgcaactgtcagtgacctcgaacacaaagagcattgcgggcagggagcacaagcagcccttaaaggactcagacaagctatggacactgccctcgcacttagagatagggacggactcagattcgtggttgctccagtggcagcaacagatgggggtggccctgtccttccccttgacgctaggtatgcactcacagtcttccctcacgtcccaggaagaacaggagagttcggacaaagactcacagaggcagagagggacagactgcttgctcttctggcagaactccacggaagaacacctcctgaaacaaccccaccagccgatatggaaccaccaggacttcctggtgttagagcagcactcgccgaaagtgaaggaccttggagtggaggaccatttgcagaacccgctagacttcttctcagagaacacgaggccacactgcacgcaagactcgctgaattcgaagccctcgtcgcaagagttaagggtcgtggagcacctcttgtcgttacccacggagaaccacacccaggcaacttgatcctcggagaggaaggctatctcctcgtggactgggatacagttggactggctccagctgaaagggatttgagtctcatctcagacgacccagctgacctcgcaagatacgcagagcttacaggaagaactccagacccagacgcactcgcactctatagactgcgttggagtctccttgatgtggctgagttcgtcgagtggttcagggctgaacaccaaagaacccaagacaccgagagtgcatggaaggggttcactgacacacttgggcaattggctgctggtggatcagctgcatagcctaggttttgtgatctgatgataagtggttggttcgtgtctcatgcacttgggaggtgatctatttcacctggtgtagtttgtgtttccgtcagttggaaaaacttatccctatcgatttcgttttcattttctgcttttcttttatgtaccttcgtttgggcttgtaacgggcctttgtatttcaactctcaataataatccaagtgcatgttaaacaatttgtcatctgtttcggctttgatatactactggtgaagatgggccgtactactgcatcacaacgaaaaataataataagatgaaaaacttgaagtggaaaaaaaaaaaaacttgaatgttcactactactcattgaccataatgtttaacatacatagctcaatagtatttttgtgaatatggcaacacaaacagtccaaaacaattgtctcttactataccaaaccaagggcgccgcttgtttgccactctttgtgtgcaatagtgtgattaccacatctccacattcaatatattccctgaattatctgacgattttgatggctcactgttttcccaagtcttgaattgtcttctgtgcgccagtcaaatgcatatgtgttgagtttatcttttaaatatcaagcttttgtttttaacttttgtttgtaaccaaaaactcacagtaggagtttgatcacataattttatgtttgcctttgcaatttctagtgagtctttgattaaaagcttgaaaagaaaatgcagccaagcttaccaagtaagttatgtgtattaaccagaggaagagagaatcttgcaaaatttcaacaaacacaaaaagaagtattactacgattggtggagaaagaaaacgattccaaatcttgaactgttgttgtaaaagcatagcagaaagtgggagacaaccgaaatagaaatgactataacttaatttaatgttatcattataatttcttctagcaaatatttagaaagtaaatatcacatcaacctttaatgtaattaagctttctctttttgattcatgtgagatgaaaagaaaaaaaagaagagaaaagtgtagaaaacacatcatttctaagctgaagagtactgaattcgtgaaatggaacgtgtgtgatgggtacaagttgcttgtggtgtatcatgtatgagtataaaatttagctcaaataacttatcattgaacggacttagttatacttttttttttttttatctttctaatacatatatttcgttgttataaaagtagaaatgttcgatttctgtaaaattatcgttgatttttcttccacgtaaaataaaattaaaatatgttatatttttagaacataacaagattcgtgtaaatttaaatttgtgagaatttctaaaaatcaattaaaaatcatcacaaattacagaaaaaccatcataaattatagaataaaaataaatacaaatacaaattatgatggtttttaacctcaaacttaaatcttaaatatatttttaacctttaaagatatgattttttggagggcaaaaatatgacctttcttcaaagtagtccatttgtttgtatttattattaattgtaaatattatttttagcaccaaaatatcttggcataaaattaaaacacacattttttttctaaggtaaacattaaaaaaagaactcattccaaaaaagtaacatgtttcaaaaaatccaaaaacatttaaattttaaaataattctagtaatagtatttatatttaatattaaaactcacaaataaatgagattgcccgttttatataaaattgggatgagtaaatatgtatgatacaattatataaggacaattaagtataattatgtgtgcatgttaaagttgatttaattaaataagatgcgtaaattattataacttttttttaacatttatacttgctaacacaccccatattcacatgataataggaggcatctctaatgagttgatatttttacacgagagtgatgagtaagtttgaattatgcaatcataaatagtaaaatttaacaatcaatatttatttaccttatttgtaagtgaaaaaaaatatttgtatatatattataatttaaagtataaatgaatttaaatgaaatattaggctgtgaaattaatcataagattcacaaataagaatctagatgaattaattaatacccatagtgaaaaatagtggtctcattaagaaaaaaattgaaaactcaagtttatgttgtgcacttttgctatgtaagagagaggaaaggattaaaatgaaatgagcaagctttataaaaaaatataaatttaaaaaaaaaaaaaaaaaaaaagcacgaggtagagtagaatgattgcatgagtggcacatggtgacaaattcgagacagatattttcacacctttccatcacatcaactctcccccgttgatcatcatttaatatctcatccaacggcaaacaaacgtacattttagaacataccagaaaatccctctctctcatcaatccacccaagtgatgaaaacgacgtcgacgtgggagaagatccgcaaacggattagacgcgtcgtcagatttcgacacgtgtacggtggatgtttcggactctctcccctcaaccgctttataaattggggtcgtggcttcgccttgaaactcgttctagtgtatgtgattgttgtgactcgttcttcttcgtcgttatcttcttcttttgttgtttgtgtgtttgttttttctctcacctgtaaggatccgccatggcctcctccgagaacgtcatcaccgagttcatgcgcttcaaggtgcgcatggagggcaccgtgaacggccacgagttcgagatcgagggcgagggcgagggccgcccctacgagggccacaacaccgtgaagctgaaggtgacgaagggcggccccctgcccttcgcctgggacatcctgtccccccagttccagtacggctccaaggtgtacgtgaagcaccccgccgacatccccgactacaagaagctgtccttccccgagggcttcaagtgggagcgcgtgatgaacttcgaggacggcggcgtggcgaccgtgacccaggactcctccctgcaggacggctgcttcatctacaaggtgaagttcatcggcgtgaacttcccctccgacggccccgtgatgcagaagaagaccatgggctgggaggcctccaccgagcgcctgtacccccgcgacggcgtgctgaagggcgagacccacaaggccctgaagctgaaggacggcggccactacctggtggagttcaagtccatctacatggccaagaagcccgtgcagctgcccggctactactacgtggacgccaagctggacatcacctcccacaacgaggactacaccatcgtggagcagtacgagcgcaccgagggccgccaccacctgttcctgtagctagacttgtccatcttctggattggccaacttaattaatgtatgaaataaaaggatgcacacatagtgacatgctaatcactataatgtgggcatcaaagttgtgtgttatgtgtaattactagttatctgaataaaagagaaagagatcatccatatttcttatcctaaatgaatgtcacgtgtctttataattctttgatgaaccagatgcatttcattaaccaaatccatatacatataaatattaatcatatataattaatatcaattgggttagcaaaacaaatctagtctaggtgtgttttgcgcgactaattaactagctgtcccacggcctaactagcacttaatcccctagcctaacctaagagcgctaatctaggctagtggtcacttagggctttaagtgcggccgcggaagttcctattccgaagttcctattctccagaaagtataggaacttcaagcttctaactaactaggacgtcccgaggtccgattccgggctaattaacacctagctcgccactcgactaattagggactaagcctagcgcttagccgttaaaacctagcacaccctaagcacccttagttaggttcccctcttaattaagccctagtgagcccctaagttaaggggacgctaagagccccctaacctagtattcggctagaggcgaactaggctaaacacctaagcgcacctctttaagctagatcgctagggggctaggctagagcttcgctagattagtctaagggcaggttaacggccgaaacgtgcaagcgctactagacaattcagtacattaaaaacgtccgcaatgtgttatctagctagctaagcgtcaatttatttacaattgaatatatcctgccaccagccagccaacagctccccgaccggcagctcggcacaaaatcaccactcgatacaggcagcccatcagtccgggacggcgtcagcgggagagccgttgtaaggcggcagactttgctcatgttaccgatgctattcggaagaacggcaactaagctgccgggtttgaaacacggatgatctcgcggagggtagcatgttgattgtaacgatgacagagcgttgctgcctgtgatcaaatatcatctccctcgcagagatccgaattatcagccttcttattcatttctcgcttaaccgtgacaggcgcgcgcggtgccacctgggtccttttcatcacgtgctataaaaataattataatttaaattttttaatataaatatataaattaaaaatagaaagtaaaaaaagaaattaaagaaaaaatagtttttgttttccgaagatgtaaaagactctagggggatcgccaacaaatactaccttttatcttgctcttcctgctctcaggtattaatgccgaattgtttcatcttgtctgtgtagaagaccacacacgaaaatcctgtgattttacattttacttatcgttaatcgaatgtatatctatttaatctgcttttcttgtctaataaatatatatgtaaagtacgctttttgttgaaattttttaaacctttgtttatttttttttcttcattccgtaactcttctaccttctttatttactttctaaaatccaaatacaaaacataaaaataaataaacacagagtaaattcccaaattattccatcattaaaagatacgaggcgcgtgtaagttacaggcaagcgatccgtcctaagaaaccattattatcatgacattaacctataaaaataggcgtatcacgaggccctttcgtctcgcgcgtttcggtgatgacggtgaaaacctctgacacatgcagctcccggagacggtcacagcttgtctgtaagcggatgccgggagcagacaagcccgtcagggcgcgtcagcgggtgttggcgggtgtcggggctggcttaactatgcggcatcagagcagattgtactgagagtgcaccataccacagcttttcaattcaattcatcattttttttttattcttttttttgatttcggtttctttgaaatttttttgattcggtaatctccgaacagaaggaagaacgaaggaaggagcacagacttagattggtatatatacgcatatgtagtgttgaagaaacatgaaattgcccagtattcttaacccaactgcacagaacaaaaacctgcaggaaacgaagataaatcatgtcgaaagctacatataaggaacgtgctgctactcatcctagtcctgttgctgccaagctatttaatatcatgcacgaaaagcaaacaaacttgtgtgcttcattggatgttcgtaccaccaaggaattactggagttagttgaagcattaggtcccaaaatttgtttactaaaaacacatgtggatatcttgactgatttttccatggagggcacagttaagccgctaaaggcattatccgccaagtacaattttttactcttcgaagacagaaaatttgctgacattggtaatacagtcaaattgcagtactctgcgggtgtatacagaatagcagaatgggcagacattacgaatgcacacggtgtggtgggcccaggtattgttagcggtttgaagcaggcggcagaagaagtaacaaaggaacctagaggccttttgatgttagcagaattgtcatgcaagggctccctatctactggagaatatactaagggtactgttgacattgcgaagagcgacaaagattttgttatcggctttattgctcaaagagacatgggtggaagagatgaaggttacgattggttgattatgacacccggtgtgggtttagatgacaagggagacgcattgggtcaacagtatagaaccgtggatgatgtggtctctacaggatctgacattattattgttggaagaggactatttgcaaagggaagggatgctaaggtagagggtgaacgttacagaaaagcaggctgggaagcatatttgagaagatgcggccagcaaaactaaaaaactgtattataagtaaacgcgcgcgggcgcgcctaaaacagcttgcgtcatgcggtcgctgcgtatatgatgcgatgagtaaataaacaaatacgcaaggggaacgcatgaaggttatcgctgtacttaaccagaaaggcgggtcaggcaagacgaccatcgcaacccatctagcccgcgccctgcaactcgccggggccgatgttctgttagtcgattccgatccccagggcagtgcccgcgattgggcggccgtgcgggaagatcaaccgctaaccgttgtcggcatcgaccgcccgacgattgaccgcgacgtgaaggccatcggccggcgcgacttcgtagtgatcgacggagcgccccaggcggcggacttggctgtgtccgcgatcaaggcagccgacttcgtgctgattccggtgcagccaagcccttacgacatatgggccaccgccgacctggtggagctggttaagcagcgcattgaggtcacggatggaaggctacaagcggcctttgtcgtgtcgcgggcgatcaaaggcacgcgcatcggcggtgaggttgccgaggcgctggccgggtacgagctgcccattcttgagtcccgtatcacgcagcgcgtgagctacccaggcactgccgccgccggcacaaccgttcttgaatcagaacccgagggcgacgctgcccgcgaggtccaggcgctggccgctgaaattaaatcaaaactcatttgagttaatgaggtaaagagaaaatgagcaaaagcacaaacacgctaagtgccggccgtccgagcgcacgcagcagcaaggctgcaacgttggccagcctcgcagacacgccagccatgaagcgggtcaactttcagttgccggcggaggatcacaccaagctgaagatgtacgcggtacgccaaggcaagaccattaccgagctgctatctgaatacatcgcgcagctaccagagtaaatgagcaaatgaataaatgagtagatgaattttagcggctaaaggaggcggcatggaaaatcaagaacaaccaggcaccgacgccgtggaatgccccatgtgtggaggaacgggcggttggccaggcgtaagcggctgggttgcctgccggccctgcaatggcactggaacccccaagcccgaggaatcggcgtgagcggtcgcaaaccatccggcccggtacaaatcggcgcggcgctgggtgatgacctggtggagaagttgaaggcagcgcaggccgcccagcggcaacgcatcgaggcagaagcacgccccggtgaatcgtggcaagcagccgctgatcgaatccgcaaagaatcccggcaaccgccggcagccggtgcgccgtcgattaggaagccgcccaagggcgacgagcaaccagattttttcgttccgatgctctatgacgtgggcacccgcgatagtcgcagcatcatggacgtggccgttttccgtctgtcgaagcgtgaccgacgagctggcgaggtgatccgctacgagcttccagacgggcacgtagaggtttccgcagggccggcaggcatggccagtgtgtgggattacgacctggtactgatggcggtttcccatctaaccgaatccatgaaccgataccgggaagggaagggagacaagcccggccgcgtgttccgtccacacgttgcggacgtactcaagttctgccggcgagccgatggcggaaagcagaaagacgacctggtagaaacctgcattcggttaaacaccacgcacgttgccatgcagcgtacgaagaaggccaagaacggccgcctggtgacggtatccgagggtgaagccttgattagccgctacaagatcgtaaagagcgaaaccgggcggccggagtacatcgagatcgagctagctgattggatgtaccgcgagatcacagaaggcaagaacccggacgtgctgacggttcaccccgattactttttgatcgatcccggcatcggccgttttctctaccgcctggcacgccgcgccgcaggcaaggcagaagccagatggttgttcaagacgatctacgaacgcagtggcagcgccggagagttcaagaagttctgtttcaccgtgcgcaagctgatcgggtcaaatgacctgccggagtacgatttgaaggaggaggcggggcaggctggcccgatcctagtcatgcgctaccgcaacctgatcgagggcgaagcatccgccggttcctaatgtacggagcagatgctagggcaaattgccctagcaggggaaaaaggtcgaaaaggtctctttcctgtggatagcacgtacattgggaacccaaagccgtacattgggaaccggaacccgtacattgggaacccaaagccgtacattgggaaccggtcacacatgtaagtgactgatataaaagagaaaaaaggcgatttttccgcctaaaactctttaaaacttattaaaactcttaaaacccgcctggcctgtgcataactgtctggccagcgcacagccgaagagctgcaaaaagcgcctacccttcggtcgctgcgctccctacgccccgccgcttcgcgtcggcctatggcgcgccggaaaatatgcatggcatgcccgttccatacagaagctgggcgaacaaacgatgctcgccttccagaaaaccgaggatgcgaaccacttcatccggggtcagcaccaccggcaagcgccgcgacggccgaggtcttccgatctcctgaagccagggcagatccgtgcacagcaccttgccgtagaagaacagcaaggccgccaatgcctgacgatgcgtggagaccgaaaccttgcgctcgttcgccagccaggacagaaatgcctcgacttcgctgctgcccaaggttgccgggtgacgcacaccgtggaaacggatgaaggcacgaacccagtggacataagcctgttcggttcgtaagctgtaatgcaagtagcgtatgcgctcacgcaactggtccagaaccttgaccgaacgcagcggtggtaacggcgcagtggcggttttcatggcttgttatgactgtttttttggggtacagtctatgcctcgggcatccaagcagcaagcgcgttacgccgtgggtcgatgtttgatgttatggagcagcaacgatgttacgcagcagggcagtcgccctaaaacaaagttaaacatcatgagggaagcggtgatcgccgaagtatcgactcaactatcagaggtagttggcgtcatcgagcgccatctcgaaccgacgttgctggccgtacatttgtacggctccgcagtggatggcggcctgaagccacacagtgatattgatttgctggttacggtgacggtaaggcttgatgaaacaacgcggcgagctttgatcaacgaccttttggaaacttcggcttcccctggagagagcgagattctccgcgctgtagaagtcaccattgttgtgcacgacgacatcattccgtggcgttatccagctaagcgcgaactgcaatttggagaatggcagcgcaatgacattcttgcaggtatcttcgagccagccacgatcgacattgatctggctatcttgctgacaaaagcaagagaacatagcgttgccttggtaggtccagcggcggaggaactctttgatccggttcctgaacaggatctatttgaggcgctaaatgaaaccttaacgctatggaactcgccgcccgactgggctggcgatgagcgaaatgtagtgcttacgttgtcccgcatttggtacagcgcagtaaccggcaaaatcgcgccgaaggatgtcgctgccgactgggcaatggagcgcctgccggcccagtatcagcccgtcatacttgaagctagacaggcttatcttggacaagaagaagatcgcttggcctcgcgcgcagatcagttggaagaatttgtccactacgtgaaaggcgagatcaccaaggtagtcggcaaataatgtctaacaattcgttcaagccgacgccgcttcgcggcgcggcttaactcaagcgttagatgcactatacgtaaccaactagtaggaacagtgaattggagttcgtcttgttataattagcttcttgggggatctttaaatactgtagaaaagaggaaggaaataataaatggctaaaatgagaatatcaccggaattgaaaaaactgatcgaaaaataccgctgcgtaaaagatacggaaggaatgtctcctgctaaggtatataagctggtgggagaaaatgaaaacctatatttaaaaatgacggacagccggtataaagggaccacctatgatgtggaacgggaaaaggacatgatgctatggctggaaggaaagctgcctgttccaaaggtcctgcactttgaacggcatgatggctggagcaatctgctcatgagtgaggccgatggcgtcctttgctcggaagagtatgaagatgaacaaagccctgaaaagattatcgagctgtatgcggagtgcatcaggctctttcactccatcgacatatcggattgtccctatacgaatagcttagacagccgcttagccgaattggattacttactgaataacgatctggccgatgtggattgcgaaaactgggaagaagacactccatttaaagatccgcgcgagctgtatgattttttaaagacggaaaagcccgaagaggaacttgtcttttcccacggcgacctgggagacagcaacatctttgtgaaagatggcaaagtaagtggctttattgatcttgggagaagcggcagggcggacaagtggtatgacattgccttctgcgtccggtcgatcagggaggatatcggggaagaacagtatgtcgagctattttttgacttactggggatcaagcctgattgggagaaaataaaatattatattttactggatgaattgttttagtacctagatacttcgctcgtgaaaagcagcgctcagggggctagtgcgctcttccgcttcctcgctcactgactcgctgcgctcggtcgttcggctgcggcgagcggtatcagctcactcaaaggcggtaatacggttatccacagaatcaggggataacgcaggaaagaacatgtgagcaaaaggccagcaaaaggccaggaaccgtaaaaaggccgcgttgctggcgtttttccataggctccgcccccctgacgagcatcacaaaaatcgacgctcaagtcagaggtggcgaaacccgacaggactataaagataccaggcgtttccccctggaagctccctcgtgcgctctcctgttccgaccctgccgcttaccggatacctgtccgcctttctcccttcgggaagcgtggcgctttctcatagctcacgctgtaggtatctcagttcggtgtaggtcgttcgctccaagctgggctgtgtgcacgaaccccccgttcagcccgaccgctgcgccttatccggtaactatcgtcttgagtccaacccggtaagacacgacttatcgccactggcagcagccactggtaacaggattagcagagcgaggtatgtaggcggtgctacagagttcttgaagtggtggcctaactacggctacactagaagaacagtatttggtatctgcgctctgctgaagccagttaccttcggaaaaagagttggtagctcttgatccggcaaacaaaccaccgctggtagcggtggtttttttgtttgcaagcagcagattacgcgcagaaaaaaaggatctcaagaagatcctttgatcttttctacggggtctgacgctcagtggaacgaaaactcacgttaagggattttggtcatgag

SEQ ID NO: 40 - DNA, 20576 bp, Artificial Sequence
  Synthetic construct comprising the T-DNA (RB to LB):  RB+GMEF1A2 PRO:FLP:UBQ3 TERM+FRT1-CTP-SPCN:UBQ10 TERM+FMVENH+PCSV EHN+MMV ENH+GM-MTH1:DS-RED:PINII-FRT87+LB
attatcaaaaaggatcttcacctagatccttttaaattaaaaatgaagcgtacgttggaatcgcttctacaaaactcacagaaacaatcaaacaaacatacacagcgatttattcacacgaacccgaattacaacggtatatatcctgtcagccaacaccaaaacatcaaaaaaatcgggatcaggatcaggatctgcggccgcatcctgcaggagctcaaacgagcaggaagcaacgagagggtggcgcgcgaccgacgtgcgtacgtagcatgagcctgagtggagacgttggacgtgtatgtatatacctctctgcgtgttaactatgtacgtaagcggcaggcagtgcaataagtgtggctctgtagtatgtacgtgcgggtacgatgctgtaagctactgaggcaagtccataaataaataatgacacgtgcgtgttctataatctcttcgcttcttcatttgtccccttgcggagtttggcatccattgatgccgttacgctgagaacagacacagcagacgaaccaaaagtgagttcttgtatgaaactatgacccttcatcgctaggctcaaacagcaccccgtacgaacacagcaaattagtcatctaactattagcccctacatgtttcagacgatacataaatatagcccatccttagcaattagctattggccctgcccatcccaagcaatgatctcgaagtatttttaatatatagtatttttaatatgtagcttttaaaattagaagataattttgagacaaaaatctccaagtatttttttgggtattttttactgcctccgtttttctttatttctcgtcacctagtttaattttgtgctaatcggctataaacgaaacagagagaaaagttactctaaaagcaactccaacagattagatataaatcttatatcctgcctagagctgttaaaaagatagacaactttagtggattagtgtatgcaacaaactctccaaatttaagtatcccaactacccaacgcatatcgttcccttttcattggcgcacgaactttcacctgctatagccgacgtacatgttcgttttttttgggcggcgcttactttcttccccgttcgttctcagcatcgcaactcaatttgttatggcggagaagcccttgtatcccaggtagtaatgcacagatatgcattattattattcataaaaaccggtccggaatcggacctcgggacgtcgccaaagttagctaggtgtccttagcgtttcttaggttctaggcgttaggggtcaataggttagcctagaagtcccgcactaacagcctagcttaacagttccaagctaagccactagactagccctatccgactaacctagtctaagccgaacggggatctaatctaagctaggcacccattagactagttcactagcgcgaccgcactaaactaggctaaaggttaatagcaactagttagctaggggacgttagctgccctcactagctagctgctaatgcagtcgacgggcccggtgatagtttggttacagcttgcatgcctgcaggtttaaacagtcgactctagatatctcgacccgggtttacttattttgtgggtatctatacttttattagatttttaatcaggctcctgatttctttttatttcgattgaattcctgaacttgtattattcagtagatcgaataaattataaaaagataaaatcataaaataatattttatcctatcaatcatattaaagcaatgaatatgtaaaattaatcttatctttattttaaaaaatcatataggtttagtatttttttaaaaataaagataggattagttttactattcactgcttattacttttaaaaaaatcataaaggtttagtatttttttaaaataaatataggaatagttttactattcactgctttaatagaaaaatagtttaaaatttaagatagttttaatcccagcatttgccacgtttgaacgtgagccgaaacgatgtcgttacattatcttaacctagctgaaacgatgtcgtcataatatcgccaaatgccaactggactacgtcgaacccacaaatcccacaaagcgcgtgaaatcaaatcgctcaaaccacaaaaaagaacaacgcgtttgttacacgctcaatcccacgcgagtagagcacagtaaccttcaaataagcgaatggggcataatcagaaatccgaaataaacctaggggcattatcggaaatgaaaagtagctcactcaatataaaaatctaggaaccctagttttcgttatcactctgtgctccctcgctctatttctcagtctctgtgtttgcggctgaggattccgaacgagtgaccttcttcgtttctcgcaaaggtaacagcctctgctcttgtctcttcgattcgatctatgcctgtctcttatttacgatgatgtttcttcggttatgtttttttatttatgctttatgctgttgatgttcggttgtttgtttcgctttgtttttgtggttcagttttttaggattcttttggtttttgaatcgattaatcggaagagattttcgagttatttggtgtgttggaggtgaatcttttttttgaggtcatagatctgttgtatttgtgttataaacatgcgactttgtatgattttttacgaggttatgatgttctggttgttttattatgaatctgttgagacagaaccatgatttttgttgatgttcgtttacactattaaaggtttgttttaacaggattaaaagttttttaagcatgttgaaggagtcttgtagatatgtaaccgtcgatagtttttttgtgggtttgttcacatgttatcaagcttaatcttttactatgtatgcgaccatatctggatccagcaaaggcgattttttaattccttgtgaaacttttgtaatatgaagttgaaattttgttattggtaaactataaatgtgtgaagttggagtatacctttaccttcttatttggctttgtgatagtttaatttatatgtattttgagttctgacttgtatttctttgaattgattctagtttaagtaatcgggatccaccatgcctaaaaagaagaggaaagttatgccccagttcgacatcctctgcaagaccccccccaaggtgctcgtgaggcagttcgtggagaggttcgagaggccctccggcgagaagatcgccctctgcgccgccgagctcacctacctctgctggatgatcacccacaacggcaccgccattaagagggccaccttcatgtcatacaacaccatcatctccaactccctctccttcgacatcgtgaacaagtccctccagttcaaatacaagacccagaaggccaccatcctcgaggcctccctcaagaagctcatccccgcctgggagttcaccatcatcccctactacggccagaagcaccagtccgacatcaccgacatcgtgtcatccctccagcttcagttcgagtcctccgaggaggctgacaagggcaactcccactccaagaagatgctgaaggccctcctctccgagggcgagtccatctgggagatcaccgagaagatcctcaactccttcgagtacacctccaggttcactaagaccaagaccctctaccagttcctcttcctcgccaccttcatcaactgcggcaggttctcagacatcaagaacgtggaccccaagtccttcaagctcgtgcagaacaagtacctaggtttgtttctgcttctacctttgatatatatataataattatcattaattagtagtaatataatatttcaaatatttttttcaaaataaaagaatgtagtatatagcaattgcttttctgtagtttataagtgtgtatattttaatttataacttttctaatatatgaccaaaacatggtgatgcctaggtgtcatcatccagtgcctcgtgaccgagaccaagacctccgtgtccaggcacatctacttcttctccgctcgcggcaggatcgaccccctcgtgtacctcgacgagttcctcaggaactcagagcccgtgctcaagagggtgaacaggaccggcaactcctcctccaacaagcaggagtaccagctcctcaaggacaacctcgtgaggtcctacaacaaggccctcaagaagaacgccccctactccatcttcgccatcaagaacggccccaagtcccacatcggtaggcacctcatgacctccttcctctcaatgaagggcctcaccgagctcaccaacgtggtgggcaactggtccgacaagagggcctccgccgtggccaggaccacctacacccaccagatcaccgccatccccgaccactacttcgccctcgtgtcaaggtactacgcctacgaccccatctccaaggagatgatcgccctcaaggacgagactaaccccatcgaggagtggcagcacatcgagcagctcaagggctccgccgagggctccatcaggtaccccgcctggaacggcatcatctcccaggaggtgctcgactacctctcctcctacatcaacaggaggatctgagttaacttttgtgatctgatgataagtggttggttcgtgtctcatgcacttgggaggtgatctatttcacctggtgtagtttgtgtttccgtcagttggaaaaacttatccctatcgatttcgttttcattttctgcttttcttttatgtaccttcgtttgggcttgtaacgggcctttgtatttcaactctcaataataatccaagtgcatgttaaacaatttgtcatctgtttcggctttgatatactactggtgaagatgggccgtactactgcatcacaacgaaaaataataataagatgaaaaacttgaagtggaaaaaaaaaaaaacttgaatgttcactactactcattgaccataatgtttaacatacatagctcaatagtatttttgtgaatatggcaacacaaacagtccaaaacaattgtctcttactataccaaaccaagggcgccgcttgtttgccactctttgtgtgcaatagtgtgattaccacatctccacattcaatatattccctgaattatctgacgattttgatggctcactgttttcccaagtcttgaattgtcttctgtgcgccagtcaaatgcatatgtgttgagtttatcttttaaatatcaagcttttgtttttaacttttgtttgtaaccaaaaactcacagtaggagtttgatcacataattttatgtttgcctttgcaatttctagtgagtctttgattaaaagcttgaaaagaaaatgcagccaagcttaccaagtaagttatgtgtattaaccagaggaagagagaatcttgcaaaatttcaacaaacacaaaaagaagtattactacgattggtggagaaagaaaacgattccaaatcttgaactgttgttgtaaaagcatagcagaaagtgggagacaaccgaaatagaaatgactataacttaatttaatgttatcattataatttcttctagcaaatatttagaaagtaaatatcacatcaacctttaatgtaattaagctttctctttttgattcatgtgagatgaaaagaaaaaaaagaagagaaaagtgtagaaaacacatcatttctaagctgaagagatctagaagttcctattccgaagttcctattctctagaaagtataggaacttcgcgaatggctgcaactactcttacatctgctttacctggtgctttcagttcatcccagagaccaagtgctcctttcaacttacaaagatcacctagagtgcttagaaggttcaacagaaagacaggacgtcaacctcgtggacttgttcgtgctgcaaaggctcaagcggcgcaaaacctgccagagaaattcgatgaaacaagactctgggaggccctcaggggatttggggttagtccaagtagggttacttacgctcccgtcggattcggagattaccactggaccgtcacagatgaagacgggagaccttggttcgcaactgtcagtgacctcgaacacaaagagcattgcgggcagggagcacaagcagcccttaaaggactcagacaagctatggacactgccctcgcacttagagatagggacggactcagattcgtggttgctccagtggcagcaacagatgggggtggccctgtccttccccttgacgctaggtatgcactcacagtcttccctcacgtcccaggaagaacaggagagttcggacaaagactcacagaggcagagagggacagactgcttgctcttctggcagaactccacggaagaacacctcctgaaacaaccccaccagccgatatggaaccaccaggacttcctggtgttagagcagcactcgccgaaagtgaaggaccttggagtggaggaccatttgcagaacccgctagacttcttctcagagaacacgaggccacactgcacgcaagactcgctgaattcgaagccctcgtcgcaagagttaagggtcgtggagcacctcttgtcgttacccacggagaaccacacccaggcaacttgatcctcggagaggaaggctatctcctcgtggactgggatacagttggactggctccagctgaaagggatttgagtctcatctcagacgacccagctgacctcgcaagatacgcagagcttacaggaagaactccagacccagacgcactcgcactctatagactgcgttggagtctccttgatgtggctgagttcgtcgagtggttcagggctgaacaccaaagaacccaagacaccgagagtgcatggaaggggttcactgacacacttgggcaattggctgctggtggatcagctgcatagcctaggctcgtctctgttatgcttaagaagttcaatgtttcgtttcatgtaaaactttggtggtttgtgttttggggccttgtataatccctgatgaataagtgttctactatgtttccgttcctgttatctctttctttctaatgacaagtcgaacttcttctttatcatcgcttcgtttttattatctgtgcttcttttgtttaatacgcctgcaaagtgactcgactctgtttagtgcagttctgcgaaacttgtaaatagtccaattgttggcctctagtaatagatgtagcgaaagtgttgagctgttgggttctaaggatggcttgaacatgttaatcttttaggttctgagtatgatgaacattcgttgttgctaagaaatgcctgtaatgtcccacaaatgtagaaaatggttcgtacctttgtccaagcattgatatgtctgatgagaggaaactgcaagatactgagcttggtttaacgaaggagaggcagtttcttccttccaaagcatttcatttgacaatgccttgatcatcttaagtagagtttctgttgtggaaagtttgaaactttgaagaaacgactctcaagtaaattgatgatcacaagtgaaagtgtatgttacataagtggatatttcaccctttttccatcaatcaaaacatcatatagtaatccattggtttatacaaacatcaaaatacatttacctctgaaatgaggaaaaaaatgcaaagagatttttgaaaatttccaacaaatggagagaaaaaaaaaaaacaaagaattaaatcaatcagtacatttataaaggttatgagacctatatgacacttattggtcaagtggcagccattccatttctagctctaattctggtaccgcagtactgcggccgcatcgagcagctggcttgtggggaccagacaaaaaaggaatggtgcagaattgttaggcgcacctaccaaaagcatctttgcctttattgcaaagataaagcagattcctctagtacaagtggggaacaaaataacgtggaaaagagctgtcctgacagcccactcactaatgcgtatgacgaacgcagtgacgaccacaaaactcgagcaacgagatcatgagccaatcaaagaggagtgatgtagacctaaagcaataatggagccatgacgtaagggcttacgcccatacgaaataattaaaggctgatgtgacctgtcggtctctcagaacctttactttttatgtttggcgtgtatttttaaatttccacggcaatgacgatgtgaccgtcgacccactaaaacattgctttgtcaaaagctaaaaaagatgatgcccgacagccacttgtgtgaagcatgagaagccggtccctccactaagaaaattagtgaagcatcttccagtggtccctccactcacagctcaatcagtgagcaacaggacgaaggaaatgacgtaagccatgacgtctaatcccagtctactaataattatttacgtggaattcgtgaaatggaacgtgtgtgatgggtacaagttgcttgtggtgtatcatgtatgagtataaaatttagctcaaataacttatcattgaacggacttagttatacttttttttttttttatctttctaatacatatatttcgttgttataaaagtagaaatgttcgatttctgtaaaattatcgttgatttttcttccacgtaaaataaaattaaaatatgttatatttttagaacataacaagattcgtgtaaatttaaatttgtgagaatttctaaaaatcaattaaaaatcatcacaaattacagaaaaaccatcataaattatagaataaaaataaatacaaatacaaattatgatggtttttaacctcaaacttaaatcttaaatatatttttaacctttaaagatatgattttttggagggcaaaaatatgacctttcttcaaagtagtccatttgtttgtatttattattaattgtaaatattatttttagcaccaaaatatcttggcataaaattaaaacacacattttttttctaaggtaaacattaaaaaaagaactcattccaaaaaagtaacatgtttcaaaaaatccaaaaacatttaaattttaaaataattctagtaatagtatttatatttaatattaaaactcacaaataaatgagattgcccgttttatataaaattgggatgagtaaatatgtatgatacaattatataaggacaattaagtataattatgtgtgcatgttaaagttgatttaattaaataagatgcgtaaattattataacttttttttaacatttatacttgctaacacaccccatattcacatgataataggaggcatctctaatgagttgatatttttacacgagagtgatgagtaagtttgaattatgcaatcataaatagtaaaatttaacaatcaatatttatttaccttatttgtaagtgaaaaaaaatatttgtatatatattataatttaaagtataaatgaatttaaatgaaatattaggctgtgaaattaatcataagattcacaaataagaatctagatgaattaattaatacccatagtgaaaaatagtggtctcattaagaaaaaaattgaaaactcaagtttatgttgtgcacttttgctatgtaagagagaggaaaggattaaaatgaaatgagcaagctttataaaaaaatataaatttaaaaaaaaaaaaaaaaaaaaagcacgaggtagagtagaatgattgcatgagtggcacatggtgacaaattcgagacagatattttcacacctttccatcacatcaactctcccccgttgatcatcatttaatatctcatccaacggcaaacaaacgtacattttagaacataccagaaaatccctctctctcatcaatccacccaagtgatgaaaacgacgtcgacgtgggagaagatccgcaaacggattagacgcgtcgtcagatttcgacacgtgtacggtggatgtttcggactctctcccctcaaccgctttataaattggggtcgtggcttcgccttgaaactcgttctagtgtatgtgattgttgtgactcgttcttcttcgtcgttatcttcttcttttgttgtttgtgtgtttgttttttctctcacctgtaaggatccgccatggcctcctccgagaacgtcatcaccgagttcatgcgcttcaaggtgcgcatggagggcaccgtgaacggccacgagttcgagatcgagggcgagggcgagggccgcccctacgagggccacaacaccgtgaagctgaaggtgacgaagggcggccccctgcccttcgcctgggacatcctgtccccccagttccagtacggctccaaggtgtacgtgaagcaccccgccgacatccccgactacaagaagctgtccttccccgagggcttcaagtgggagcgcgtgatgaacttcgaggacggcggcgtggcgaccgtgacccaggactcctccctgcaggacggctgcttcatctacaaggtgaagttcatcggcgtgaacttcccctccgacggccccgtgatgcagaagaagaccatgggctgggaggcctccaccgagcgcctgtacccccgcgacggcgtgctgaagggcgagacccacaaggccctgaagctgaaggacggcggccactacctggtggagttcaagtccatctacatggccaagaagcccgtgcagctgcccggctactactacgtggacgccaagctggacatcacctcccacaacgaggactacaccatcgtggagcagtacgagcgcaccgagggccgccaccacctgttcctgtagctagacttgtccatcttctggattggccaacttaattaatgtatgaaataaaaggatgcacacatagtgacatgctaatcactataatgtgggcatcaaagttgtgtgttatgtgtaattactagttatctgaataaaagagaaagagatcatccatatttcttatcctaaatgaatgtcacgtgtctttataattctttgatgaaccagatgcatttcattaaccaaatccatatacatataaatattaatcatatataattaatatcaattgggttagcaaaacaaatctagtctaggtgtgttttgcgcgactaattaactagctgtcccacggcctaactagcacttaatcccctagcctaacctaagagcgctaatctaggctagtggtcacttagggctttaagtgcggccgcggaagttcctattccgaagttcctattctccagaaagtataggaacttcaagcttctaactaactaggacgtcccgaggtccgattccgggctaattaacacctagctcgccactcgactaattagggactaagcctagcgcttagccgttaaaacctagcacaccctaagcacccttagttaggttcccctcttaattaagccctagtgagcccctaagttaaggggacgctaagagccccctaacctagtattcggctagaggcgaactaggctaaacacctaagcgcacctctttaagctagatcgctagggggctaggctagagcttcgctagattagtctaagggcaggttaacggccgaaacgtgcaagcgctactagacaattcagtacattaaaaacgtccgcaatgtgttatctagctagctaagcgtcaatttatttacaattgaatatatcctgccaccagccagccaacagctccccgaccggcagctcggcacaaaatcaccactcgatacaggcagcccatcagtccgggacggcgtcagcgggagagccgttgtaaggcggcagactttgctcatgttaccgatgctattcggaagaacggcaactaagctgccgggtttgaaacacggatgatctcgcggagggtagcatgttgattgtaacgatgacagagcgttgctgcctgtgatcaaatatcatctccctcgcagagatccgaattatcagccttcttattcatttctcgcttaaccgtgacaggcgcgcgcggtgccacctgggtccttttcatcacgtgctataaaaataattataatttaaattttttaatataaatatataaattaaaaatagaaagtaaaaaaagaaattaaagaaaaaatagtttttgttttccgaagatgtaaaagactctagggggatcgccaacaaatactaccttttatcttgctcttcctgctctcaggtattaatgccgaattgtttcatcttgtctgtgtagaagaccacacacgaaaatcctgtgattttacattttacttatcgttaatcgaatgtatatctatttaatctgcttttcttgtctaataaatatatatgtaaagtacgctttttgttgaaattttttaaacctttgtttatttttttttcttcattccgtaactcttctaccttctttatttactttctaaaatccaaatacaaaacataaaaataaataaacacagagtaaattcccaaattattccatcattaaaagatacgaggcgcgtgtaagttacaggcaagcgatccgtcctaagaaaccattattatcatgacattaacctataaaaataggcgtatcacgaggccctttcgtctcgcgcgtttcggtgatgacggtgaaaacctctgacacatgcagctcccggagacggtcacagcttgtctgtaagcggatgccgggagcagacaagcccgtcagggcgcgtcagcgggtgttggcgggtgtcggggctggcttaactatgcggcatcagagcagattgtactgagagtgcaccataccacagcttttcaattcaattcatcattttttttttattcttttttttgatttcggtttctttgaaatttttttgattcggtaatctccgaacagaaggaagaacgaaggaaggagcacagacttagattggtatatatacgcatatgtagtgttgaagaaacatgaaattgcccagtattcttaacccaactgcacagaacaaaaacctgcaggaaacgaagataaatcatgtcgaaagctacatataaggaacgtgctgctactcatcctagtcctgttgctgccaagctatttaatatcatgcacgaaaagcaaacaaacttgtgtgcttcattggatgttcgtaccaccaaggaattactggagttagttgaagcattaggtcccaaaatttgtttactaaaaacacatgtggatatcttgactgatttttccatggagggcacagttaagccgctaaaggcattatccgccaagtacaattttttactcttcgaagacagaaaatttgctgacattggtaatacagtcaaattgcagtactctgcgggtgtatacagaatagcagaatgggcagacattacgaatgcacacggtgtggtgggcccaggtattgttagcggtttgaagcaggcggcagaagaagtaacaaaggaacctagaggccttttgatgttagcagaattgtcatgcaagggctccctatctactggagaatatactaagggtactgttgacattgcgaagagcgacaaagattttgttatcggctttattgctcaaagagacatgggtggaagagatgaaggttacgattggttgattatgacacccggtgtgggtttagatgacaagggagacgcattgggtcaacagtatagaaccgtggatgatgtggtctctacaggatctgacattattattgttggaagaggactatttgcaaagggaagggatgctaaggtagagggtgaacgttacagaaaagcaggctgggaagcatatttgagaagatgcggccagcaaaactaaaaaactgtattataagtaaacgcgcgcgggcgcgccttttcagcctgatacagattaaatcagaacgcagaagcggtctgataaaacagaatttgcctggcggcagtagcgcggtggtcccacctgaccccatgccgaactcagaagtgaaacgccgtagcgccgatggtagtgtggggtctccccatgcgagagtagggaactgccaggcatcaaataaaacgaaaggctcagtcgaaagactgggcctttcgttttatctgttgtttgtcggtgaacgctctcctgagtaggacaaatccgccgggagcggatttgaacgttgcgaagcaacggcccggagggtggcgggcaggacgcccgccataaactgccaggcatcaaattaagcagaaggccatcctgacggatggcctttttgcgtttctacaaactcttaccgcacccggagcgggcgcgaggccgccaaggcccgaggcgtgaagtttggcccccgccctaccctcaccccggcacagatcgcgcacgcccgcgagctgatcgaccaggaaggccgcaccgtgaaagaggcggctgcactgcttggcgtgcatcgctcgaccctgtaccgcgcacttgagcgcagcgaggaagtgacgcccaccgaggccaggcggcgcggtgccttccgtgaggacgcattgaccgaggccgacgccctggcggccgccgagaatgaacgccaagaggaacaagcatgaaaccgcaccaggacggccaggacgaaccgtttttcattaccgaagagatcgaggcggagatgatcgcggccgggtacgtgttcgagccgcccgcgcacgtctcaaccgtgcggctgcatgaaatcctggccggtttgtctgatgccaagctggcggcctggccggccagcttggccgctgaagaaaccgagcgccgccgtctaaaaaggtgatgtgtatttgagtaaaacagcttgcgtcatgcggtcgctgcgtatatgatgcgatgagtaaataaacaaatacgcaaggggaacgcatgaaggttatcgctgtacttaaccagaaaggcgggtcaggcaagacgaccatcgcaacccatctagcccgcgccctgcaactcgccggggccgatgttctgttagtcgattccgatccccagggcagtgcccgcgattgggcggccgtgcgggaagatcaaccgctaaccgttgtcggcatcgaccgcccgacgattgaccgcgacgtgaaggccatcggccggcgcgacttcgtagtgatcgacggagcgccccaggcggcggacttggctgtgtccgcgatcaaggcagccgacttcgtgctgattccggtgcagccaagcccttacgacatatgggccaccgccgacctggtggagctggttaagcagcgcattgaggtcacggatggaaggctacaagcggcctttgtcgtgtcgcgggcgatcaaaggcacgcgcatcggcggtgaggttgccgaggcgctggccgggtacgagctgcccattcttgagtcccgtatcacgcagcgcgtgagctacccaggcactgccgccgccggcacaaccgttcttgaatcagaacccgagggcgacgctgcccgcgaggtccaggcgctggccgctgaaattaaatcaaaactcatttgagttaatgaggtaaagagaaaatgagcaaaagcacaaacacgctaagtgccggccgtccgagcgcacgcagcagcaaggctgcaacgttggccagcctcgcagacacgccagccatgaagcgggtcaactttcagttgccggcggaggatcacaccaagctgaagatgtacgcggtacgccaaggcaagaccattaccgagctgctatctgaatacatcgcgcagctaccagagtaaatgagcaaatgaataaatgagtagatgaattttagcggctaaaggaggcggcatggaaaatcaagaacaaccaggcaccgacgccgtggaatgccccatgtgtggaggaacgggcggttggccaggcgtaagcggctgggttgcctgccggccctgcaatggcactggaacccccaagcccgaggaatcggcgtgagcggtcgcaaaccatccggcccggtacaaatcggcgcggcgctgggtgatgacctggtggagaagttgaaggcagcgcaggccgcccagcggcaacgcatcgaggcagaagcacgccccggtgaatcgtggcaagcagccgctgatcgaatccgcaaagaatcccggcaaccgccggcagccggtgcgccgtcgattaggaagccgcccaagggcgacgagcaaccagattttttcgttccgatgctctatgacgtgggcacccgcgatagtcgcagcatcatggacgtggccgttttccgtctgtcgaagcgtgaccgacgagctggcgaggtgatccgctacgagcttccagacgggcacgtagaggtttccgcagggccggcaggcatggccagtgtgtgggattacgacctggtactgatggcggtttcccatctaaccgaatccatgaaccgataccgggaagggaagggagacaagcccggccgcgtgttccgtccacacgttgcggacgtactcaagttctgccggcgagccgatggcggaaagcagaaagacgacctggtagaaacctgcattcggttaaacaccacgcacgttgccatgcagcgtacgaagaaggccaagaacggccgcctggtgacggtatccgagggtgaagccttgattagccgctacaagatcgtaaagagcgaaaccgggcggccggagtacatcgagatcgagctagctgattggatgtaccgcgagatcacagaaggcaagaacccggacgtgctgacggttcaccccgattactttttgatcgatcccggcatcggccgttttctctaccgcctggcacgccgcgccgcaggcaaggcagaagccagatggttgttcaagacgatctacgaacgcagtggcagcgccggagagttcaagaagttctgtttcaccgtgcgcaagctgatcgggtcaaatgacctgccggagtacgatttgaaggaggaggcggggcaggctggcccgatcctagtcatgcgctaccgcaacctgatcgagggcgaagcatccgccggttcctaatgtacggagcagatgctagggcaaattgccctagcaggggaaaaaggtcgaaaaggtctctttcctgtggatagcacgtacattgggaacccaaagccgtacattgggaaccggaacccgtacattgggaacccaaagccgtacattgggaaccggtcacacatgtaagtgactgatataaaagagaaaaaaggcgatttttccgcctaaaactctttaaaacttattaaaactcttaaaacccgcctggcctgtgcataactgtctggccagcgcacagccgaagagctgcaaaaagcgcctacccttcggtcgctgcgctccctacgccccgccgcttcgcgtcggcctatggcgcgccggaaaatatgcatggcatgcccgttccatacagaagctgggcgaacaaacgatgctcgccttccagaaaaccgaggatgcgaaccacttcatccggggtcagcaccaccggcaagcgccgcgacggccgaggtcttccgatctcctgaagccagggcagatccgtgcacagcaccttgccgtagaagaacagcaaggccgccaatgcctgacgatgcgtggagaccgaaaccttgcgctcgttcgccagccaggacagaaatgcctcgacttcgctgctgcccaaggttgccgggtgacgcacaccgtggaaacggatgaaggcacgaacccagtggacataagcctgttcggttcgtaagctgtaatgcaagtagcgtatgcgctcacgcaactggtccagaaccttgaccgaacgcagcggtggtaacggcgcagtggcggttttcatggcttgttatgactgtttttttggggtacagtctatgcctcgggcatccaagcagcaagcgcgttacgccgtgggtcgatgtttgatgttatggagcagcaacgatgttacgcagcagggcagtcgccctaaaacaaagttaaacatcatgagggaagcggtgatcgccgaagtatcgactcaactatcagaggtagttggcgtcatcgagcgccatctcgaaccgacgttgctggccgtacatttgtacggctccgcagtggatggcggcctgaagccacacagtgatattgatttgctggttacggtgacggtaaggcttgatgaaacaacgcggcgagctttgatcaacgaccttttggaaacttcggcttcccctggagagagcgagattctccgcgctgtagaagtcaccattgttgtgcacgacgacatcattccgtggcgttatccagctaagcgcgaactgcaatttggagaatggcagcgcaatgacattcttgcaggtatcttcgagccagccacgatcgacattgatctggctatcttgctgacaaaagcaagagaacatagcgttgccttggtaggtccagcggcggaggaactctttgatccggttcctgaacaggatctatttgaggcgctaaatgaaaccttaacgctatggaactcgccgcccgactgggctggcgatgagcgaaatgtagtgcttacgttgtcccgcatttggtacagcgcagtaaccggcaaaatcgcgccgaaggatgtcgctgccgactgggcaatggagcgcctgccggcccagtatcagcccgtcatacttgaagctagacaggcttatcttggacaagaagaagatcgcttggcctcgcgcgcagatcagttggaagaatttgtccactacgtgaaaggcgagatcaccaaggtagtcggcaaataatgtctaacaattcgttcaagccgacgccgcttcgcggcgcggcttaactcaagcgttagatgcactatacgtaaccaactagtaggaacagtgaattggagttcgtcttgttataattagcttcttgggggatctttaaatactgtagaaaagaggaaggaaataataaatggctaaaatgagaatatcaccggaattgaaaaaactgatcgaaaaataccgctgcgtaaaagatacggaaggaatgtctcctgctaaggtatataagctggtgggagaaaatgaaaacctatatttaaaaatgacggacagccggtataaagggaccacctatgatgtggaacgggaaaaggacatgatgctatggctggaaggaaagctgcctgttccaaaggtcctgcactttgaacggcatgatggctggagcaatctgctcatgagtgaggccgatggcgtcctttgctcggaagagtatgaagatgaacaaagccctgaaaagattatcgagctgtatgcggagtgcatcaggctctttcactccatcgacatatcggattgtccctatacgaatagcttagacagccgcttagccgaattggattacttactgaataacgatctggccgatgtggattgcgaaaactgggaagaagacactccatttaaagatccgcgcgagctgtatgattttttaaagacggaaaagcccgaagaggaacttgtcttttcccacggcgacctgggagacagcaacatctttgtgaaagatggcaaagtaagtggctttattgatcttgggagaagcggcagggcggacaagtggtatgacattgccttctgcgtccggtcgatcagggaggatatcggggaagaacagtatgtcgagctattttttgacttactggggatcaagcctgattgggagaaaataaaatattatattttactggatgaattgttttagtacctagatacttcgctcgtgaaaagcagcgctcagggggctagtgcgctcttccgcttcctcgctcactgactcgctgcgctcggtcgttcggctgcggcgagcggtatcagctcactcaaaggcggtaatacggttatccacagaatcaggggataacgcaggaaagaacatgtgagcaaaaggccagcaaaaggccaggaaccgtaaaaaggccgcgttgctggcgtttttccataggctccgcccccctgacgagcatcacaaaaatcgacgctcaagtcagaggtggcgaaacccgacaggactataaagataccaggcgtttccccctggaagctccctcgtgcgctctcctgttccgaccctgccgcttaccggatacctgtccgcctttctcccttcgggaagcgtggcgctttctcatagctcacgctgtaggtatctcagttcggtgtaggtcgttcgctccaagctgggctgtgtgcacgaaccccccgttcagcccgaccgctgcgccttatccggtaactatcgtcttgagtccaacccggtaagacacgacttatcgccactggcagcagccactggtaacaggattagcagagcgaggtatgtaggcggtgctacagagttcttgaagtggtggcctaactacggctacactagaagaacagtatttggtatctgcgctctgctgaagccagttaccttcggaaaaagagttggtagctcttgatccggcaaacaaaccaccgctggtagcggtggtttttttgtttgcaagcagcagattacgcgcagaaaaaaaggatctcaagaagatcctttgatcttttctacggggtctgacgctcagtggaacgaaaactcacgttaagggattttggtcatgag

SEQ ID NO: 41 - DNA, 17462 bp, Artificial Sequence
  Synthetic construct comprising the T-DNA (RB to LB): RB+LOXP+GM-QBU PRO::CTP:SPCN::UBQ14 TERM+GM-EF1A2 PRO::DS-RED2::UBQ3 TERM+LOXP+LB
gacgtcggccgaaagagcgacaagcagatcacgcttttcgacaaagcgtacgttggaatcgcttctacaaaactcacagaaacaatcaaacaaacatacacagcgatttattcacacgaacccgaattacaacggtatatatcctgtcagccaacaccaaaacatcaaaaaaatcgggatcaggatcaggatctgcggccgcatcctgcaggtttaaacggccggccttcactagctagctgctaagctcaaacgagcaggaagcaacgagagggtggcgcgcgaccgacgtgcgtacgtagcatgagcctgagtggagacgttggacgtgtatgtatatacctctctgcgtgttaactatgtacgtaagcggcaggcagtgcaataagtgtggctctgtagtatgtacgtgcgggtacgatgctgtaagctactgaggcaagtccataaataaataatgacacgtgcgtgttctataatctcttcgcttcttcatttgtccccttgcggagtttggcatccattgatgccgttacgctgagaacagacacagcagacgaaccaaaagtgagttcttgtatgaaactatgacccttcatcgctaggctcaaacagcaccccgtacgaacacagcaaattagtcatctaactattagcccctacatgtttcagacgatacataaatatagcccatccttagcaattagctattggccctgcccatcccaagcaatgatctcgaagtatttttaatatatagtatttttaatatgtagcttttaaaattagaagataattttgagacaaaaatctccaagtatttttttgggtattttttactgcctccgtttttctttatttctcgtcacctagtttaattttgtgctaatcggctataaacgaaacagagagaaaagttactctaaaagcaactccaacagattagatataaatcttatatcctgcctagagctgttaaaaagatagacaactttagtggattagtgtatgcaacaaactctccaaatttaagtatcccaactacccaacgcatatcgttcccttttcattggcgcacgaactttcacctgctatagccgacgtacatgttcgttttttttgggcggcgcttactttcttccccgttcgttctcagcatcgcaactcaatttgttatggcggagaagcccttgtatcccaggtagtaatgcacagatatgcattattattattcataaaatcgagctagttaccctatgaggtgacatgaagcgctcacggttactatgacggttagcttcacgactgttggtggcagtagcgtacgacttagctatagttccggacttacctaactgactagagtcacacttagctgaccctagtcacttaataacttcgtatagcatacattatacgaagttatggcgcgccaagcttggatctcctgcaggatctggccggccggatgggcggatctcgtacctcaactttgtatagaaaagttgggccgaattcgagctcggtacggccagaatggccatctggattcagcagggggtgattgcggttacatcatgtacggaaaaataattctaatccttgatttaaatttgaacttgactatttatttattctttatttcattttgtaaatcattttatgtatctcctggcaagcaattttatccaccttgcaccaacaccttcgggttccataatcaaaccaccttaacttcacaccatgctgtaactcacaccgcccagcatctccaatgtgaaagaagctaaaatttaataaacaatcatacgaagcagtgacaaaataccagatggtattaatgcttcgataaaattaattggaaagtataaaatggtagaaaataataaattataattaatttaagtaagataaaaaataattaaaaactaaaatgttaaaattttaaaaaaattattttaaataatatttaaaaacattaaaaatcattttaaaaaatttatttatagaacaattaaataaatatttcagctaataaaaaacaaaagcttacctagccttagaagacaacttgtccaacaattagatgatacccattgcccttacgttttctttaacatcaattattgtttttgtcaacaagctatcttttagttttattttattggtaaaaaatatgtcgccttcaagttgcatcatttaacacatctcgtcattagaaaaataaaactcttccctaaacgattagtagaaaaaatcattcgataataaataagaaagaaaaattagaaaaaaataacttcattttaaaaaaatcattaaggctatattttttaaatgactaattttatatagactgtaactaaaagtatacaatttattatgctatgtatcttaaagaattacttataaaaatctacggaagaatatcttacaaagtgaaaaacaaatgagaaagaatttagtgggatgattatgattttatttgaaaattgaaaaaataattattaaagactttagtggagtaagaaagctttcctattagtcttttcttatccataaaaaaaaaaaaaaaaatctagcgtgacagcttttccatagattttaataatgtaaaatactggtagcagccgaccgttcaggtaatggacactgtggtcctaacttgcaacgggtgcgggcccaatttaataacgccgtggtaacggataaagccaagcgtgaagcggtgaaggtacatctctgactccgtcaagattacgaaaccgtcaactacgaaggactccccgaaatatcatctgtgtcataaacaccaagtcacaccatacatgggcacgcgtcacaatatgattggagaacggttccaccgcatatgctataaaatgcccccacacccctcgaccctaatcgcacttcaattgcaatcaaattagttcattctctttgcgcagttccctacctctcctttcaaggttcgtagatttcttccgtttttttttcttcttctttattgtttgttctacatcagcatgatgttgatttgattgtgttttctatcgtttcatcgattataaattttcataatcagaagattcagcttttattaatgcaagaacgtccttaattgatgattttataaccgtaaattaggtctaattagagtttttttcataaagattttcagatccgtttacaacaagccttaattgttgattctgtagtcgtagattaaggtttttttcatgaactacttcagatccgttaaacaacagccttatttgttgatacttcagtcgtttttcaagaaattgttcagatccgttgataaaagccttattcgttgattctgtatggtatttcaagagatattgctcaggtcctttagcaactaccttatttgttgattctgtggccatagattaggattttttttcacgaaattgcttcttgaaattacgtgatggattttgattctgatttatcttgtgattgttgactctacagccatggctgcaactactcttacatctgctttacctggtgctttcagttcatcccagagaccaagtgctcctttcaacttacaaagatcacctagagtgcttagaaggttcaacagaaagacaggacgtcaacctcgtggacttgttcgtgctgcaaaggctcaagcggcgcaaaacctgccagagaaattcgatgaaacaagactctgggaggccctcaggggatttggggttagtccaagtagggttacttacgctcccgtcggattcggagattaccactggaccgtcacagatgaagacgggagaccttggttcgcaactgtcagtgacctcgaacacaaagagcattgcgggcagggagcacaagcagcccttaaaggactcagacaagctatggacactgccctcgcacttagagatagggacggactcagattcgtggttgctccagtggcagcaacagatgggggtggccctgtccttccccttgacgctaggtatgcactcacagtcttccctcacgtcccaggaagaacaggagagttcggacaaagactcacagaggcagagagggacagactgcttgctcttctggcagaactccacggaagaacacctcctgaaacaaccccaccagccgatatggaaccaccaggacttcctggtgttagagcagcactcgccgaaagtgaaggaccttggagtggaggaccatttgcagaacccgctagacttcttctcagagaacacgaggccacactgcacgcaagactcgctgaattcgaagccctcgtcgcaagagttaagggtcgtggagcacctcttgtcgttacccacggagaaccacacccaggcaacttgatcctcggagaggaaggctatctcctcgtggactgggatacagttggactggctccagctgaaagggatttgagtctcatctcagacgacccagctgacctcgcaagatacgcagagcttacaggaagaactccagacccagacgcactcgcactctatagactgcgttggagtctccttgatgtggctgagttcgtcgagtggttcagggctgaacaccaaagaacccaagacaccgagagtgcatggaaggggttcactgacacacttgggcaattggctgctggtggatcagctgcatagcctaggaaacttatctctgttatgaatcagaagaagttcatgtctcgtttcatttaaaactttggtggtttgtgttttggggccttgtaaagcccctgatgaataattgttcaactatgtttccgttcctgtgttatacctttctttctaatgagtaatgacatcaaacttcttctgtattgaaattatgtccttgtgagtctctttatcatcgtttcgtctttacattatatgtgctacttttgtctaatgagcctgaaaagtggctccaatggtacgcactggaagatttgttggcttctggtagatatagcgacagtgttgagcttgtaatatcatgtctcttattgctaaattagttcctttcttaacagaaaccttcaaagtttttgtttttgttttcatttacctaatgtacacatacgctggccatgactaacaacatgtccaggcttagagcatatttttttctagcttaaattgttaacttgtcattcagtaaaatccgagaattgtgaagctctaattgaagctaattcgttttataaagtcagttaaaaagtatactaaattatccaacttttcttcaaaatctcaaaattctatgacaaaacgatagtctttgtttatgtcagtaccacaaagaggtggaaaaaaacaccaaaaaaacaataagcaaactatacactgagaagaaaaataaaagagagctcaatagatgttttatactaacggtagattagatcaaagatccaagctttactctacatagagcagaacccagaatcccttcatatctcttttattctagcaccgataatctactgaaaagaagacacttagagctctgtctctttgtcaaagaagtcccagccgtcatccagaagctccttacgttcattaacagaggtaccctgggatccgatatcgatgggccctggccgaagcttggtcacccggtccgggcctagaaggccgatctcccgggcacccagctttcttgtacaaagtggcccggggcggccgaagctggccttctaggcccggaccggaattcctcgaggcggccgcctaactaactaggggtttacttattttgtgggtatctatacttttattagatttttaatcaggctcctgatttctttttatttcgattcaattcctgaacttgtattattcagtagatcgaataaattataaaaagataaaatcataaaataatattttatcctatcaatcatattaaagcaatgaatatgtaaaattaatcttatctttattttaaaaaatcatataggtttagtatttttttaaaaataaagataggattagttttactattcactgcttattacttttaaaaaaatcataaaggtttagtatttttttaaaataaatataggaatagttttactattcactgctttaatagaaaaatagtttaaaatttaagatagttttaatcccagcatttgccacgtttgaacgtgagccgaaacgatgtcgttacattatcttaacctagctgaaacgatgtcgtcataatatcgccaaatgccaactggactacgtcgaacccacaaatcccacaaagcgcgtgaaatcaaatcgctcaaaccacaaaaaagaacaacgcgtttgttacacgctcaatcccacgcgagtagagcacagtaaccttcaaataagcgaatggggcataatcagaaatccgaaataaacctaggggcattatcggaaatgaaaagtagctcactcaatataaaaatctaggaaccctagttttcgttatcactctgtgctccctcgctctatttctcagtctctgtgtttgcggctgaggattccgaacgagtgaccttcttcgtttctcgcaaaggtaacagcctctgctcttgtctcttcgattcgatctatgcctgtctcttatttacgatgatgtttcttcggttatgtttttttatttatgctttatgctgttgatgttcggttgtttgtttcgctttgtttttgtggttcagttttttaggattcttttggtttttgaatcgattaatcggaagagattttcgagttatttggtgtgttggaggtgaatcttttttttgaggtcatagatgtgttgtatttgtgttataaacatgcgactttgtatgattttttacgaggttatgatgttctggttgttttattatgaatctgttgagacagaaccatgatttttgttgatgttcgtttacactattaaaggtttgttttaacaggattaaaagttttttaagcatgttgaaggagtcttgtagatatgtaaccgtcgatagtttttttgtgggtttgttcacatgttatcaaggttaatcttttactatgtatgcgaccatatctggatccagcaaaggcgattttttaattccttgtgaaacttttgtaatatgaagttgaaattttgttattggtaaactataaatgtgtgaagttggagtatacctttaccttcttatttggctttgtgatagtttaatttatatgtattttgagttctgacttgtatttctttgaattgattctaggttaagtaatccatggcctcctccgagaacgtcatcaccgagttcatgcgcttcaaggtgcgcatggagggcaccgtgaacggccacgagttcgagatcgagggcgagggcgagggccgcccctacgagggccacaacaccgtgaagctgaaggtgacgaagggcggccccctgcccttcgcctgggacatcctgtccccccagttccagtacggctccaaggtgtacgtgaagcaccccgccgacatccccgactacaagaagctgtccttccccgagggcttcaagtgggagcgcgtgatgaacttcgaggacggcggcgtggcgaccgtgacccaggactcctccctgcaggacggctgcttcatctacaaggtgaagttcatcggcgtgaacttcccctccgacggccccgtgatgcagaagaagaccatgggctgggaggcctccaccgagcgcctgtacccccgcgacggcgtgctgaagggcgagacccacaaggccctgaagctgaaggacggcggccactacctggtggagttcaagtccatctacatggccaagaagcccgtgcagctgcccggctactactacgtggacgccaagctggacatcacctcccacaacgaggactacaccatcgtggagcagtacgagcgcaccgagggccgccaccacctgttcctgtagggtacctagatcttgttaactgagctcttttgtgatctgatgataagtggttggttcgtgtctcatgcacttgggaggtgatctatttcacctggtgtagtttgtgtttccgtcagttggaaaaacttatccctatcgatttcgttttcattttctgcttttcttttatgtaccttcgtttgggcttgtaacgggcctttgtatttcaactctcaataataatccaagtgcatgttaaacaatttgtcatctgtttcggctttgatatactactggtgaagatgggccgtactactgcatcacaacgaaaaataataataagatgaaaaacttgaagtggaaaaaaaaaaaaacttgaatgttcactactactcattgaccataatgtttaacatacatagctcaatagtatttttgtgaatatggcaacacaaacagtccaaaacaattgtctcttactataccaaaccaagggcgccgcttgtttgccactctttgtgtgcaatagtgtgattaccacatctccacattcaatatattccctgaattatctgacgattttgatggctcactgttttcccaagtcttgaattgtcttctgtgcgccagtcaaatgcatatgtgttgagtttatcttttaaatatcaagcttttgtttttaacttttgtttgtaaccaaaaactcacagtaggagtttgatcacataattttatgtttgcctttgcaatttctagtgagtctttgattaaaagcttgaaaagaaaatgcagccaagcttaccaagtaagttatgtgtattaaccagaggaagagagaatcttgcaaaatttcaacaaacacaaaaagaagtattactacgattggtggagaaagaaaacgattccaaatcttgaactgttgttgtaaaagcatagcagaaagtgggagacaaccgaaatagaaatgactataacttaatttaatgttatcattataatttcttctagcaaatatttagaaagtaaatatcacatcaacctttaatgtaattaagctttctctttttgattcatgtgagatgaaaagaaaaaaaagaagagaaaagtgtagaaaacacatcatttctaagctgaagaagcttggcgcgccggtcacccggtccgggccattctggccgatccgttaacgcccgggcaactttattatacaaagttgatggtacggatccgtcgacggcgcgccgcggacctgaattccagcacactggcggccgttaataacttcgtatagcatacattatacgaagttatagtggcatcacgtttctagttctagacccatcagctgaggtacaaattaattaataagtgactagggtcacgtgaccctagtcacttatgattccgatgacttcgtaggttcctagctcaagccgctcgtgtccaagcgtcacttacgattagctaatgattacggcatctaggaccgactagttcttatgtgcttctagtctccaaatgtggttgatagttattttgctctaagatcaacagtaatgaagtataaatcatcgttgtggtgtgctactcggttaattgagcattaacacacacaaacatgacgaggatggtataatctccaaaaatgtgtactttgttaggtgggaccctatagccttgattaatgtgctatgttaggcatgcctggaaacgtgtgacgcatatgttttgtgaacctgttgatattatatgtgcttttatattaccatattttattaaaatactaatatttattactagtaagatataacattctatctagcttaaaaactaaccataaatattccataataactagatttaccaaactaatatactaaatatacataataaatacaaaattaacaagacaataatcaatatttatgagcttaatatatttagacattatggttggtcgacgataatcatgctaacttttcgtaattgcttgattgaaatatgcttagaataatgcctctttgttctacatggcaaatagggaccattatggtgtaacaccctgggaaccacaaacaccccgaaatgctactaaactacacaactaaccttcatatataaaatttcgacagcatctcctttgaaaatttgcatagacgtggaagcaacagagtataaacagatctagctagctaagtttaaacggccggccaaacgtgcaagcgctactagacaattcagtacattaaaaacgtccgcaatgtgttattaagttgtctaagcgtcaatttatttacaattgaatatatcctgccaccagccagccaacagctccccgaccggcagctcggcacaaaatcaccactcgatacaggcagcccatcagtccgggacggcgtcagcgggagagccgttgtaaggcggcagactttgctcatgttaccgatgctattcggaagaacggcaactaagctgccgggtttgaaacacggatgatctcgcggagggtagcatgttgattgtaacgatgacagagcgttgctgcctgtgatcaaatatcatctccctcgcagagatccgaattatcagccttcttattcatttctcgcttaaccgtgacaggcgcgcgcggtgccacctgggtccttttcatcacgtgctataaaaataattataatttaaattttttaatataaatatataaattaaaaatagaaagtaaaaaaagaaattaaagaaaaaatagtttttgttttccgaagatgtaaaagactctagggggatcgccaacaaatactaccttttatcttgctcttcctgctctcaggtattaatgccgaattgtttcatcttgtctgtgtagaagaccacacacgaaaatcctgtgattttacattttacttatcgttaatcgaatgtatatctatttaatctgcttttcttgtctaataaatatatatgtaaagtacgctttttgttgaaattttttaaacctttgtttatttttttttcttcattccgtaactcttctaccttctttatttactttctaaaatccaaatacaaaacataaaaataaataaacacagagtaaattcccaaattattccatcattaaaagatacgaggcgcgtgtaagttacaggcaagcgatccgtcctaagaaaccattattatcatgacattaacctataaaaataggcgtatcacgaggccctttcgtctcgcgcgtttcggtgatgacggtgaaaacctctgacacatgcagctcccggagacggtcacagcttgtctgtaagcggatgccgggagcagacaagcccgtcagggcgcgtcagcgggtgttggcgggtgtcggggctggcttaactatgcggcatcagagcagattgtactgagagtgcaccataccacagcttttcaattcaattcatcattttttttttattcttttttttgatttcggtttctttgaaatttttttgattcggtaatctccgaacagaaggaagaacgaaggaaggagcacagacttagattggtatatatacgcatatgtagtgttgaagaaacatgaaattgcccagtattcttaacccaactgcacagaacaaaaacctgcaggaaacgaagataaatcatgtcgaaagctacatataaggaacgtgctgctactcatcctagtcctgttgctgccaagctatttaatatcatgcacgaaaagcaaacaaacttgtgtgcttcattggatgttcgtaccaccaaggaattactggagttagttgaagcattaggtcccaaaatttgtttactaaaaacacatgtggatatcttgactgatttttccatggagggcacagttaagccgctaaaggcattatccgccaagtacaattttttactcttcgaagacagaaaatttgctgacattggtaatacagtcaaattgcagtactctgcgggtgtatacagaatagcagaatgggcagacattacgaatgcacacggtgtggtgggcccaggtattgttagcggtttgaagcaggcggcagaagaagtaacaaaggaacctagaggccttttgatgttagcagaattgtcatgcaagggctccctatctactggagaatatactaagggtactgttgacattgcgaagagcgacaaagattttgttatcggctttattgctcaaagagacatgggtggaagagatgaaggttacgattggttgattatgacacccggtgtgggtttagatgacaagggagacgcattgggtcaacagtatagaaccgtggatgatgtggtctctacaggatctgacattattattgttggaagaggactatttgcaaagggaagggatgctaaggtagagggtgaacgttacagaaaagcaggctgggaagcatatttgagaagatgcggccagcaaaactaaaaaactgtattataagtaaacgcgcgcgggcgcgcctaaaacagcttgcgtcatgcggtcgctgcgtatatgatgcgatgagtaaataaacaaatacgcaaggggaacgcatgaaggttatcgctgtacttaaccagaaaggcgggtcaggcaagacgaccatcgcaacccatctagcccgcgccctgcaactcgccggggccgatgttctgttagtcgattccgatccccagggcagtgcccgcgattgggcggccgtgcgggaagatcaaccgctaaccgttgtcggcatcgaccgcccgacgattgaccgcgacgtgaaggccatcggccggcgcgacttcgtagtgatcgacggagcgccccaggcggcggacttggctgtgtccgcgatcaaggcagccgacttcgtgctgattccggtgcagccaagcccttacgacatatgggccaccgccgacctggtggagctggttaagcagcgcattgaggtcacggatggaaggctacaagcggcctttgtcgtgtcgcgggcgatcaaaggcacgcgcatcggcggtgaggttgccgaggcgctggccgggtacgagctgcccattcttgagtcccgtatcacgcagcgcgtgagctacccaggcactgccgccgccggcacaaccgttcttgaatcagaacccgagggcgacgctgcccgcgaggtccaggcgctggccgctgaaattaaatcaaaactcatttgagttaatgaggtaaagagaaaatgagcaaaagcacaaacacgctaagtgccggccgtccgagcgcacgcagcagcaaggctgcaacgttggccagcctcgcagacacgccagccatgaagcgggtcaactttcagttgccggcggaggatcacaccaagctgaagatgtacgcggtacgccaaggcaagaccattaccgagctgctatctgaatacatcgcgcagctaccagagtaaatgagcaaatgaataaatgagtagatgaattttagcggctaaaggaggcggcatggaaaatcaagaacaaccaggcaccgacgccgtggaatgccccatgtgtggaggaacgggcggttggccaggcgtaagcggctgggttgcctgccggccctgcaatggcactggaacccccaagcccgaggaatcggcgtgagcggtcgcaaaccatccggcccggtacaaatcggcgcggcgctgggtgatgacctggtggagaagttgaaggcagcgcaggccgcccagcggcaacgcatcgaggcagaagcacgccccggtgaatcgtggcaagcagccgctgatcgaatccgcaaagaatcccggcaaccgccggcagccggtgcgccgtcgattaggaagccgcccaagggcgacgagcaaccagattttttcgttccgatgctctatgacgtgggcacccgcgatagtcgcagcatcatggacgtggccgttttccgtctgtcgaagcgtgaccgacgagctggcgaggtgatccgctacgagcttccagacgggcacgtagaggtttccgcagggccggcaggcatggccagtgtgtgggattacgacctggtactgatggcggtttcccatctaaccgaatccatgaaccgataccgggaagggaagggagacaagcccggccgcgtgttccgtccacacgttgcggacgtactcaagttctgccggcgagccgatggcggaaagcagaaagacgacctggtagaaacctgcattcggttaaacaccacgcacgttgccatgcagcgtacgaagaaggccaagaacggccgcctggtgacggtatccgagggtgaagccttgattagccgctacaagatcgtaaagagcgaaaccgggcggccggagtacatcgagatcgagctagctgattggatgtaccgcgagatcacagaaggcaagaacccggacgtgctgacggttcaccccgattactttttgatcgatcccggcatcggccgttttctctaccgcctggcacgccgcgccgcaggcaaggcagaagccagatggttgttcaagacgatctacgaacgcagtggcagcgccggagagttcaagaagttctgtttcaccgtgcgcaagctgatcgggtcaaatgacctgccggagtacgatttgaaggaggaggcggggcaggctggcccgatcctagtcatgcgctaccgcaacctgatcgagggcgaagcatccgccggttcctaatgtacggagcagatgctagggcaaattgccctagcaggggaaaaaggtcgaaaaggtctctttcctgtggatagcacgtacattgggaacccaaagccgtacattgggaaccggaacccgtacattgggaacccaaagccgtacattgggaaccggtcacacatgtaagtgactgatataaaagagaaaaaaggcgatttttccgcctaaaactctttaaaacttattaaaactcttaaaacccgcctggcctgtgcataactgtctggccagcgcacagccgaagagctgcaaaaagcgcctacccttcggtcgctgcgctccctacgccccgccgcttcgcgtcggcctatggcgcgccggaaaatatgcatggcatgcccgttccatacagaagctgggcgaacaaacgatgctcgccttccagaaaaccgaggatgcgaaccacttcatccggggtcagcaccaccggcaagcgccgcgacggccgaggtcttccgatctcctgaagccagggcagatccgtgcacagcaccttgccgtagaagaacagcaaggccgccaatgcctgacgatgcgtggagaccgaaaccttgcgctcgttcgccagccaggacagaaatgcctcgacttcgctgctgcccaaggttgccgggtgacgcacaccgtggaaacggatgaaggcacgaacccagtggacataagcctgttcggttcgtaagctgtaatgcaagtagcgtatgcgctcacgcaactggtccagaaccttgaccgaacgcagcggtggtaacggcgcagtggcggttttcatggcttgttatgactgtttttttggggtacagtctatgcctcgggcatccaagcagcaagcgcgttacgccgtgggtcgatgtttgatgttatggagcagcaacgatgttacgcagcagggcagtcgccctaaaacaaagttaaacatcatgagggaagcggtgatcgccgaagtatcgactcaactatcagaggtagttggcgtcatcgagcgccatctcgaaccgacgttgctggccgtacatttgtacggctccgcagtggatggcggcctgaagccacacagtgatattgatttgctggttacggtgacggtaaggcttgatgaaacaacgcggcgagctttgatcaacgaccttttggaaacttcggcttcccctggagagagcgagattctccgcgctgtagaagtcaccattgttgtgcacgacgacatcattccgtggcgttatccagctaagcgcgaactgcaatttggagaatggcagcgcaatgacattcttgcaggtatcttcgagccagccacgatcgacattgatctggctatcttgctgacaaaagcaagagaacatagcgttgccttggtaggtccagcggcggaggaactctttgatccggttcctgaacaggatctatttgaggcgctaaatgaaaccttaacgctatggaactcgccgcccgactgggctggcgatgagcgaaatgtagtgcttacgttgtcccgcatttggtacagcgcagtaaccggcaaaatcgcgccgaaggatgtcgctgccgactgggcaatggagcgcctgccggcccagtatcagcccgtcatacttgaagctagacaggcttatcttggacaagaagaagatcgcttggcctcgcgcgcagatcagttggaagaatttgtccactacgtgaaaggcgagatcaccaaggtagtcggcaaataatgtctaacaattcgttcaagccgacgccgcttcgcggcgcggcttaactcaagcgttagatgcactatacgtaaccaactagtgcgctcttccgcttcctcgctcactgactcgctgcgctcggtcgttcggctgcggcgagcggtatcagctcactcaaaggcggtaatacggttatccacagaatcaggggataacgcaggaaagaacatgtgagcaaaaggccagcaaaaggccaggaaccgtaaaaaggccgcgttgctggcgtttttccataggctccgcccccctgacgagcatcacaaaaatcgacgctcaagtcagaggtggcgaaacccgacaggactataaagataccaggcgtttccccctggaagctccctcgtgcgctctcctgttccgaccctgccgcttaccggatacctgtccgcctttctcccttcgggaagcgtggcgctttctcatagctcacgctgtaggtatctcagttcggtgtaggtcgttcgctccaagctgggctgtgtgcacgaaccccccgttcagcccgaccgctgcgccttatccggtaactatcgtcttgagtccaacccggtaagacacgacttatcgccactggcagcagccactggtaacaggattagcagagcgaggtatgtaggcggtgctacagagttcttgaagtggtggcctaactacggctacactagaagaacagtatttggtatctgcgctctgctgaagccagttaccttcggaaaaagagttggtagctcttgatccggcaaacaaaccaccgctggtagcggtggtttttttgtttgcaagcagcagattacgcgcagaaaaaaaggatctcaagaagatcctttgatcttttctacggggtctgacgctcagtggaacgaaaactcacgttaagggattttggtcatgagattatcaaaaaggatcttcacctagatccttttaaattaaaaatgaagcgtaccgacgatcttgctgcgttcggatattttcgtggagttcccgccacagacccggattgaaggcgagatccagcaactcgcgccagatcatcctgtgacggaactttggcgcgtgatgactggccag

SEQ ID NO: 42 - DNA, 38871 bp, Artificial Sequence
  Synthetic construct containing Agrobacterium rhizogenes VIR genes
catcaggcgcgccagcgagttgctttctctcgttggctgatgggaagaaagcgcataggagtcgccgccaaattcttgtcggaccagcttggtttgttcggtcggtgtttttcaccgtggatgcggagtaatgagaaactgggtcagaccactgggctccgttgattccgcgaaatctgcttagttggattggctgtcagaaggagaggtgaccgcatgatttgggatcatttatcaccttcccgaagggttctgcttgatatcaaatcgtggtctgtattggtactggtaattgcctcgatatcttttgcggttctggccataggatcttggcaagacaacgaaagcaacgaagcgatcctgacagagctgcaatcgatcgacgtggattgcgcgatgctgcagcggaatgtgttgcgtgctcacgccggccttcttcggaattaccatcctcttatcgtccctctggggcgactgcgcacgagcgtcgcagatttacagcagctttttaggcgggcgggcctcgacggggccggtgaattttctgaattgctggcgcgggtgaagagctcagtagatgcgaccgacgcagccgttgcagcgttcggtacgcaaaatgtaatgttccaggattcgttggcgacctttaaccagtcgatagcttcgcttccgaggtctttggatacgagggatttgaactcgctagaagtcgctgagttgggctatctgatgctccagttttcgtctcagccaaatttcgagtttgcacgggaaatcaaccaacgtctcgaccggcttcaggtttcggcgaacggggataaggcaggcgtcaaggagatcgttcgcagtgggaggattatcctgactctactgccgcgattgaaagacaccgttggagtgatccaaacttctgaaaccatcgacaacacgaagaagttgcagcgagcataccttgaagcttatagcttggccagcgcgggtgaacagcgggtacgggtcttcctcggcgcagtttcggttttcttttgcttttgcataatttccctagtccataggttacatctgcgaaccaaggtgttgacgagacgactggacttcgaagaagtgatcaaaaagattgggctttgcttcgaagatgcttcagaagcaaaaccgtcgttggaatcctcaacgaatgccgcgttgggaattatccaattattctttgaagctcatcaatgcgcgctgggactggtcaacatcaatgagaatgacgttggcgtcaccttttttggaagcactcctgcgccagagtggaacgaacaacgggtgcgcgaaattgtttccacggtaggggccgaggacggcgggcggattttccgagcctatcctcaacgaaaagcgagctgcttcggtgaggactctccatttctgtgggtgctgcttgcgttcaaggtatccgatcgaatagtcgctgtctttggcctgggatttgatcgagagcatctacagacgccgaccgcacgtgaaatgcagctgatggaactagcggctgcatgtgttagccactatgcggtcattcggcgcaagcagtcccagcgagatattctggaacgtcgtttgaaacatgcggaacggcttgaagcagttggtacgcttgccggcggcattgcgcatgaatttaacaacattttgggtgcagttctgggttacgcggaaatggcacacaacgttctgcgccgtcgtactcatgctcgagactacatcgatcacatcatttctgaaggcaatcgagcgcggttgattgtcaaccagatccttgcccttagtcgaaagcgggatcgaacaacaaaaccattcgatctttcggagttagtgaccgtgatcgcgccgtcgttacgtgttgcgttgcctccgggcgtcgagctcgatttcaaatatcagagcgctccaatggttatcgaaggaaactcacttgaggtcgagcaaatactgatgaatttgtgcaaaaactctgctgaagcatgccgagagttagggcgtgtggaggtcagcgttaggaggtctgtcgtacggaaacacaaggttcttacaaacggtactattcccaccggcgagtatatccttctttcagttgaggataacggcgcaggcataacagaggcggtattatcgcacattttcgagcctttttttactacccgcgcccgcagcggtggcacgggcctgggattatccacggttcacggtcacgttagcgcgatggctggttacatcgacgtggtatcaactgtcggcagaggtacgcgcttcgacgtctacttgccaccttcgtcgaagcagccggtaaattcagagagtttttttgaccctggaagaatcccgcttgggaacggcgagattgtcgcggtggtcgaacccgacttagccacgctggaaatgtacgaggaaaagatcgcggcgctgggctatgagccagtcggctttaacacgttggatggtttaatcgactgggtgttggaaggaaaagaacctgatcttgttctaattgatcaaccgtctttgctggatggagacggtgcagggtccttaatctcaaagctggcaaaagcgcccatcatcattattggcgaaaaccagaaaaatgttcccctttctgcggatcgcgagggatctgcccgttttttggaaaagccgatttcagcaaagactctcgcctatgtcgttcgtgcgaatatcagaactgaacgaatggtcggctcgaatagcagcggaatcgtgattgcgtcataaaccgatacgccctctgaacagaagccggccgcacaacgcgattgcttattaatttaatccccagtcgcggaatcagccggtcagtcccgacatccgcaacaacgcaactccggttgcggctgcaatcaccgccagtgatatacaggcaaaaaaccggtaaacctgctcttttgatgttaagaggagatggatcgaagcgatcatcagaaggaaaatcgtcgcaagtgcgccatacgcccaatactcgttcgaataaagccatgttcccaaagccaacagaccgcaaacaaaaaaaacgagttcgagcttttgcaagacaacacctcaaaaagatctcgttgtgatcctaggacatcggtctcgcaggtcaatactgcgatcgcgtttcatgcaacggacttgatgtatctgccgcgcggcactaggagacgtgaggaacggccccctgtctagggtgcagtcggtgccgatctccgcttcgggggcgctttgcgaaatctcctgcggctgcaccatcctccgcgccagcctgcgaaaattttcgaaaaccgccgctatggtgaattcgctctcatggcctagggatcaccgcttgggccgccgattccctcgattcaagaaatcaaacggcttcgcttcgatgcttcaaatgaaaccgagaggtaagataataaaatcagaaagtaacagacacctcccatagtcgcgactgttagcgatcgagtcatttcatgctgaccaagatcattgcgatacagtggggaataaacaatgcggaagacggcaggatctttcgggatcatttttctgatggtccagccaagcaaagctgcgccgctctcgttcgctgaatttaaccaactcgctcgcgaatgcgcaccttcagtcgctccatcgacgcttggagcgattgcgaaggttgaaagtcagtttgatccgctcgtgctgcatgacaataccaccggcgaaactttacatggcaagaatccggcggatgctacgcaaagcgtaaacaatcgcgtcgcagcagggcattcagtcgatgtaggcctaatgcaagtgaactcgaaaaatttcgcgaacttgggcttgactgccggcaatgcaatcaacccttgcgtgtccctgtcggcggcggcggacctgctcgtacggcattatagtggcggcgacacggtagagtcagaacaacttgccatccggcgagcaatttcggcttacaataccggcaacccgacacgcggcttcgcgaacggctatgtgcggagggtcgaagtggcggctcagctactcgtccccccgctggctcagtcggggaaaaaaggcgaccgtgatgagcggagtccagaagaaccctggaacgtctggggttcatacgaccgctcccactcagcagtcggttcgtccgcgccgccagaggcgcagcagccgaatgagcgcaaatcccccgaacaagatcaagttttcgaaccgaatgatggagatgcaccataatggcatggcttgaaggataccgcgcaccgtcgaaattccgtggcctctggcacagagctgtgcgcctgctggctccgcacgtgccgagcgtcaccggcgcgatcggctggagcttgtttttctgcgagccagctgccgcgcaggccgctgggggcactgaccccgccaccatggtcaacaatatctgcacgtttattctcggtccgtttggtcaatcgctcgccgttcttggtatcgtagccatcggggtatcgtggatgttcggccgagcttcccttggtctggtagcaggtgttgttggcgggatcgttatcatgtttggagccagctttctcggccaaacactgacagggggcgggggatgaatgccgatcttgaagaagccacactctacttggcggcaacgagacctgcattgttctttggggtaccgctgacgcttgctggagttttcatgatgttggcggggtttctcatcgttgttgtgcagaaccccctctatgaaattgttctcttgccgctgtggcttggagcgcggctcatcgtagagcgggactataacgcggcaagcgtggtcttgctgtttctccagacggcagggagaagcgttgacggccatgcgtggggcggcgcgagcgtcagtcccaaccccatcagagtggcgtcgcgaggaagaggaatgacgtaatgttcggagcaagcggacggaccgagagatctggggaaatctacctgccttacgtagggcacctcagcgaccatgtcgttcttctagaggacggttccatcttgaccatggcgcatatcagtggccttcccttcgaactggaggaagtagaggtccgaaatgcgcgctgccgtgcctttaacacgctctttcgcaatattgccgatgataacgtctcagtatatgcccatctcgtccgtcacaacgatgtgccagtaccgccggtacgccattttcgcagcaccttcgcgtcaagcctaagcgaaacgttcgagcggcgtgttctgtctggtaaactgtttcgaaacgaccacttcctcacgctcattgtctctcctcgcaccgctctcggtaaagtgggaagcagattcaccaggcgctatgggaagaacccaggcgatcttgcgcatcagatccgacatctggaggatctttggaacgttgtcgctggcgcgcttgatgggtatggacttcgtcgacttggcatccgagaaaaaaatcaggtgcttttcacggaaattggtgaagcccttcgcctgataatgacttgtcgttttttaccggtgccggtcgttagcggatccctcggcgcctcagtttataccgaccgggtcatctgcggcaagcgtgccctcgagattagagcgccgaaagatcgttacgttggatctatcttttcattccgcgagtacccggcaaagacgcggcccggaatgcttaacacactcctgtcatcaagttttccgctcgttttgagccagagtttctctttcctcacacgtgcacaggctcacgccaagctcagcctcaaatcgaaccagatgactagctccggtgacaaggcggtcacccagatcggtgaactcgcccaagcagaagattcattggccagtagcgaattcgtcatgggttcgcatcatctcagcctttgtgtctatggcgatgatctcgatacccttgccgactatggtgcgcgagcccgcacgagcttgtcggacgcgggcgcggttatcgtgcaggaaagcattggaatggaggctgcatactggtctcagcttccaggaaaccacagatggcgtacccgtcccggagcgatcacttcacgcaactttgccggcttggtttcattcgagaacttccctatcggaaggaagtcgggccattggggaggtgcggttgctcgtttccgtacaaacggcgggacgcccttcgattatattccgcacgaaaacgacgtgggcatgaccgcgatcttcgggccgattggcaggggaaaaacgacacttatgaccttcatcctggcgatgcttgagcagagcgtggttgaccgcagcgggacgatcgtttttttcgataaggatcgtggcggtgaactgcttgtgcgcgccaccgggggcacgtacctcacgttacgacgaggtgtcccaagcggccttgcacctttgcgcggcctagaggatacggcagcggcgcgggactttctccgcgagtggatcgtggcgctgattgaaagcgacggcagggggggaatttcgccggaggaaaatcgccgcttagagcgcggtatccaacggcaactttcgtttgagcctaacatgagatcccttgcgggcttaagggagttcttattgcacgggccctccgaaggtgcgggagctagattgcagcggtggtgccgaggcaacgctcttggctgggcgtttgacggcgaatcggacgaagtgaagttagatccttcgattacgggcttcgatatgacccatctcctcgaatatgaggaggtatgcgcgccggccgcagcataccttttgcatcgaataggagcgatggtagatggccgacgcttcgtcatgagctgcgatgagtttcgttcctacctgcttaatcagaaattcgcagcagtcgtcgacaagttcctgctgaccgtccggaagaacaacggaatgttagttcttgcgacgcagcaacccgagcacgtacttgattcaccattgggcgcaagcctcgtagcacaatgtatgaccaaaatcttctacccatcacccactgcagaccgctctgcttacatagacgggttgaagtgcaccgagcgagaatttcaggctattcgcgaggagatggcgattggcagccgcaaatttctgctgaagcgcgagagcggaagtgttgtgtgcgaattcgatctgcgcgacatgccggaatacgtcgccgtactatccgggcgtgccaatacggtgcgttttgcccagcagttgcgcgagacgcatggagaggaaccctctgcctggctggaaaaattcatgacgcgctaccatgaggcacaggattgatctggagttcgaagtcatgaatattacgaagctcgtaataaacgcacttttcatatgccttgttctgtcggggactgccaaggcgcagtttgttgtcagcgaccctgcaacggaggccgaaacgctgacgacagcgatcaatactgcggcgaacctcgagcaattgatcacgatggtgacaatgttgacctcgccctttggcgtcaccggcatgttatcagcgatcgaccagaaaaaccaatatccctctgccggccaactcgacaaggaaatgttttcgccgcagatgcctgcttcgacaactgcgcgtgcaattaccttagatgccgatcgcgcagtcgtgggcgacgacgctgaaggaaatcttttgcgacagcagattgcaggcgccgcaaatgctgccggtgtcgcggctgacaatctggatgcaatggacaagcgccttgcggcaaattctgagacatcgggccagctctcccgctcacgcaatatcatgcaggccaccgtcaccaacggtttgcttctcaaacagatccatgacgcaattattcaaaacattcaggcgaccagcctgttgacgatgaccaccgcacaggcggggctgcacgaggcggaggaggcggcgacccaacgaaaggaacatcaggcaactgcgcttatatttggcgccgctcaactacactgatccgctactgttcattcagggccctctttctccgtagaaaatcgaagctaaatccaggtaagggcaatgaattttagcattcctgcgccttttacggcgatacatacgatattcgacctcgccttcaccgtcgggctggacacgttgcttggggacattcaacgggcagtcagcgctcctctcgtggcctgcgtgacgctatggatcattgtccagggcatcctcgtaatgcgtggggaaatggacgcacggggcggaatcacccgggtaatcatggtatcggtagttgttgctcttatcgttgagcaggcggaatatcatgattacgttgtctcggttttcgaggatacgattccgaatttcattcaacagttcggtatcagtgggcttcctttgcagacgattcctgctcagctcgacacgatgttttcactcacgcaagtagcctttcagaagattgcttctgaaattgggccgatgaacgatcaagacatcctcgcctttcaaggcgcacaatggattttctatggaacgctttggactgcgtttggaatctacgatgccgtcggaatcctcaccaaggtgctattggcgatcggtccattgatgctcgttggctatctcttcgatcgcactagagacatggccgcgaaatggatcggccagctcgtcacttatggcatacttctgcttcttctaaacatagtggcaactatcgtggttctgacggaagcgacggcactcgtgctaatgctcggggttatcacttctgctggcacaacggcggccaagataataggcctctatgaactcgacatgttctttctgaccggcgacgccttgatcgtcgctcttccggcaatcgccgggaatattggagggagctattggagcggtgcgacgcaaacggccggtagcttaaatcgccatttcgcccggacaatccgccgttagtcccagcttcacaaatggaggatttccttgaagtactttctattgtttttgatcatcggcttggcgtcttgtcagacaagcgatcagttggcgacttgtaaggggcctatttttccgctgaacgtcgggcgatggcagcctgctcagtcggaccttcagcctaccaacgcaggagaggctaatgaacggctctgaatacgcgctgttagtagagcgggaagcattggcggaccactataaggaagtagaagcatttcagtctgcacgtgctagatcagctcggcgaatctctagagccttggctgctttggctgtcattgcagtcgcaggaaacgtggcgcaggccttcgctatcgccgtcatgcttccgctgaacaaacttgttccagtatatctgtgggtgcgcccagacggtacagttgacagtgaggtatctatttcgcggttgccggcgacgcaggagcaagcggtcgtgaatgcgtctctatgggagtatgttcgtctgcgggagagctactcggcggatacagcccaatacgcctatgatctggtctcgagcttcagtgccccaacggtgcgtcaagattatcagcagttcttcaattaccccagtcctagctccccccaaaccatcattggtaagcgcggaaagctggaagccgagcacatcggctcaaacgaacttatgactggcgtccagcagatccgctacaaacgcactctcatcatggaagggcaagctccaatagtaaccacctggaccgcaacggtacattatgaaacggtaactaacttgcccggccgattgaggctgacaaatccaggcggcttaatcgttacctcctatcaaacttcggaagataccgtttcgaacacgacgcggagccagcaatgatcaagaatttgtttctgggcctggtttgtatcctctttgtaaccagcggcgcgaacgcggaagacacgccagcggcaggcaaactggatccacgtatgcgctatctcgcctacaatcccgatgaggttgtgcacctttcaaccgctgttggagccacattggtcgtaacatttgggtccaatgaagcggtgacagccgtcgccgtttccaacagcaaagatctcgctgcgctcccacgcggcaattatctgtttttcaaggccagcaaagtgctgcagccgcagcctgtgatcgtccttaccgcaagcgacgcaggaatgcggcgctatgttttcagcctcgcgaccagaacgatgtctcggctcgataaagagcagcctgacctctactacagcgtacagttcacttatcctgccgacgttgccgctgctcgccgaaaagaagcggagcagagagatcttgcggatcggatgcgggcgcaagcacaatatcagcgtcgagccgaggacttgctcgagcgtccgccagcaggtggcagcacagatgcgaaaaattggagctatgtcgcgcaaggagaccgctcgctattaccgctcgaggttttcgacaacgggtattccacgacatttcgctttcccggaaacgtgcgtgtaccttcaatctacgtgattaacccagatggcaaggaagccacggccaactattcagttaagggagattacgttgaagtagcatcagtttccagggaatggcgtctgcgggacggccatacagtactttgcatctggaataaggcatatgacgccgtcggacggaagccgggcactggcacagtcagacccgatgtagtgcgcgtgctgaaggagacgaggtgatggaggacgtgaatgcccaatccagagaaggtatcgacgcgcccggatccctcgtcaccgatcctcatggccggcgcctctcggggtcgcaaaagctccttgttgcgggtttagtcctggtactgtcgttgagcctcatttggctcggggcgcgttcaaagaaaaggaccgagccgtctccaccaaacacaatgatcgatgccaacacgaagccctttcggccggccccgattgatattcccgccaaaccggcaatgacaccgccagctgcggaagcaacggttttgccgtcggatcaacatcagcgagaacacaacgaactgaggcccgaagaaacaccgatctttgcctacagcggaggtgatcagaatggtgtcaaatccgccccacacgctgatattcagaacggtggccaagacaatagaaacgccaactccctagccgcgtcggaggattctgctgagaacgatctctctgtgcgcttgaaaccgacagtgttgcagcctagcctcgctatacttttgccgcacccagatttcactgttacgcaaggaacgatcattccctgcatactgcaaaccgccattgatacaaatctggcagggtatgtgaaatgtgtacttcctcaagacatacgcggagcaaccggaaatgttgtgcttctggatcgcggaacgacagttgtcggcgaaatccagcgtggactgcagcagggagacgcccgcgttttcgttctctggaatcgcgcggagacgccctcacacgccgtcgtctctctttcctccccgggggccgacgaactcggccgttccggactgccgggtacggtcgacaatcatttctggaaacgctttagcggggccatgctcctgagtgtcgtccagggcgcagtccaggcggcaagtagctacgcagggaattcgaccggcgggaccagcttcaatagtttccaaaacaatggcgaacaagcggccgatacggccctaagggcggccataaacattcccccaaccttgaaaaaaaatcagggtgacacggtctcgatcttcgtcgcgcgggatttggatttctcaggaatctaccagcttcatatgactggtggatcggtgaaacgtcggcatctgcgctaatgcacagatagccaaagctgcgagatgcatccaatggaagtaaatccgcaattgcgcgcccttcttaacccagtcttgcaatggctcgatgacccgaggactgaagaagttgccataaacggaccgggagaagcctttgtacgccaaagtggcgtcttcacgaggttcgccgcaccgttctcttatgatgatctcgaagacatcgccattctagcaggggcattgcgaaaacaagatgtcggcccccgcaaccctctttgcgctaccgagctcccaggtggcgagcggatgcaaatctgcttgccgccaacggtaccctctggcaccgtgagcttgacaattcgacgaccgagcaatcgtgtctctgaattgggggaagtctcggctcgctacgatgttcgtcgatggaatcagtggcaaatccggacgcagcgacgagatcaactagacgaagcgattctgcgcgactacgacaatggcgatctggaatcatttttacgtgcatgtgttatcggtaagcggacgatgttgctttgtgggccgaccggaagcggcaagaccacgatgagcaagaccttgatcagtgctattccgcgggaagaaaggctgataaccattgaagatacgctcgaactcgtcattccacatgagaaccacgtcagactgctctactccaagagtggggcagggctaggtgcagtgactgcggaacagctgctccaggcaagccttcggatgcggcctgaccgaatattgctcggtgagatgcgcgacgacgcggcgtgggcgtacctgagtgaggtggtctcaggccaccccggatcgatttcaaccatacatggggcgaatcccgtccaaggcttcaaaaagctgttctcacttgtgaagagcagtgtgcagggggcatgcttggaagatcgcacactgattgacatgttggcaacggcaatcgatgtcattgttcccttccgtgcttacggcgatgtttacgaagtgggcgaagtatggctcgccgccgatgcccgccgacgcggtgagacgataggggatcttctaaaccagcaatagagccgcacggaggtctgctcgcgcagattttaaagcgttacaagtgtagcgcgctgcagcaactcctgtcatcaatctgaaaccttccgttagcatttttgtcatgcacggcttggccgaaattttgccgaactaccctcatagtgagagaaaatgatcaggttgaggctgagacgtacatcctctgcttgcacgaatctatcgattctgcagaatcccatacggaggcgaactggtgaaacatgttcttgtcatcgatgacgatgccgcgatgcgccatcttattaccgagtatttaacgattcatgccttaagggtcaccgcggtatcagatagccagcaattcaaccgggtacttgcatcagagacggtcgatgtcgtcgtcgtggatctcaatttagggcgtgaagacggacttgagatcgttcgcagtctcgccacaaaatccgatgttccaattataatcatcagcggtgatcgccttgaggaggcggataaagtggtggcgctcgagctgggagcaacggattttatcgcgaaacctttcggaacgcgcgagttcctagcacgcatccgtgtcgcattacgcgtgcgaccgaatgtcatgcgaaccaaagaccggcgttcattttgtttcgccggctggacacttagtctcagacagcggcgattggtatccgcacaaaatggcgaggtgaagcttacggcaggggaattcaatctgctcgtcgctttcctggaaaagccacgcgacgtgctttcccgagaacagctcctcatcgcgagccgagtgcgtgaggaggaagtatatgacagaagcattgatgttctcattttgaggctccgccgaaagcttgagcaggatgcagcgagcccaaacttgatcaaaactgccaggggtgccggctatttcttcgacgctgatgtggatgtttcctatggaggtctgatggcggcctgaagcagcgacgcatatgcctttttcgatctgatcctaggacgcggactcgttaattgaagcgatccagattctcgtcgcggcaagtttgagcccggcaaggtagttgaacaatctcctttccaggaaattgaatcacacaacgtcatcaacatgaaccccgttatggggacacagcctagagtgagctggctgtgttgtagctgggtaggggctgcctcattgcctgctgtcgaatacaataccgccgtcaagtgaccggcctcatcatattagcgttcttttcttatcttctcttcggcaaagaaagatgcaagtgcggccgtagccagtttgtggccaaaagccctggcggtctccaatctcaatggatcaaagtgattgcgtgcgacttctaacagcgataccgggaacatgcgagaagtcaggacaacgataggtttttcgactacttttgagatcgggtagctttgaggccccgtgctaaatgatccgtccgccaacatgttctcaaaatcggcgagcgcacggcgcaagatcatctgcagcgccttggtagcgctgtactgcagaatcaagttgtcatatatcttcgatacctcaggagcgggggggcgtgccgaaagaaagacctggactttttccggcggcgcagtcgaactcaaggcgtccgccgttagcattgattgccgatcgaagttgtcacgacgtttggcggcgataggaggcgctggtcgtttttcctttccggctctttcaggtaattgcgaaggcgccaagttttgcgaggaaagagctgggattgggtgaacgatcggtcgcgcggcagcaagccgtcttgcttcaccgacagacaaagcaggtttgcggatccccatcttcaattccccaaggtatcgccaatcaattctgaaattgttacgagttcctccatcgcaattctgaggttccgctcaaggaggcgcatcgtcggatcatttgtcgtgttcagcaatgtgagatgcaacatgccacgctctttcattgcagcgaacgcgtctcgttcatgcattggagattgtacgacaggcagattcaccagcatgtctgacatcgcgcgttgtgacgtggttaatcggccaaccgggactcgctggcgtaacacggcggtcggaatcactaagttctcgctcagcagcagctcgacaacataacgatatgtcgaaagtgcctcatcgatatccagcggcgttaacattgtcgggatcagaagcaggtttgagctagcgatgattgtgttattgagctcgctcgaaccaccatgcgtatcggccagcgcataatcaaattcctgaagctcggcgtcctcataagccgcttcaagaagcgacatttcttctgcagcgtacacctcgcaggatgtatcccaggtgttgctacgcatcgcgttttctttccatcgcgttaacggccggttctcgtccgcatcgaagagagccactcttttgccgtctcttgcaaacgcagcgcaaaggcccatgagcgccgtggttttgccggcgcctcctttaaatgagcaaaatgtcagaagtttcataagtttatcctggcgacgttgtgaacgaaagtgcgtctgtatcattgtttgtatgtgtgactgtctgtatagcgaaattatcaggagtatatttcaattgcattgaaggatagttgcaaatgtaactatatagatccgaatatgaacagtatattcttgaatttattctgttggcggctaggctccctcagtctcaactggagaatttcactccggaacaaatccagatcattccgttttctatggagcaagccatgtcgcaaagcgaaaaatccacttcaagtgacattgtcgaccggcgtgaaggcccgaagattgaaggtttcaaggtcgttagcactcgtttgcgatcgtcggaatatgagagcttctctcgccaagcccgtctgctggggctctccgacagcatggccataagagttgcggttcgccgcattgccggctttctcgaaatcgatgcagagactcgtcagatgatggaagccattcttcattcaataggagcactctcaaacaacattgccgcgctgctgtgtgcctatgctgaaaatccgacaacggatttgggcgctctgcaagctgaacgaaacgctttcggtaaatcgttcgctgatctcgacggtttgctccgttccattttgtccgtatcacggcgacggatcgacggttgctccatgctggcggacgccttgcagcattaacgtagcacttgggggaatctgttggatgcccgatcggtctcaagtcatcatccgcattgtgccgggaggtgggacgaagaccctccaacagattatcaaccagttggagtatctatctcggaagggcaagttggagctgcagcgttcggcccgacatctcgatactttcgtaccaccggatgaaatccgcgaactcgccctaagctgggttcaagaaaccgggacttatcacgaaagtcggccagacgaggaaaggcaacaggagttgacgacccacattattgtaagcttccctgccggtacaagtcaggtagcagcttatgcagcgagccgggagtgggcagccgagatgtttgggtcaggcgcagggggaggccgatacaactatcttacagcctttcacatcgatcgcgatcacccacatctgcatgtggtcgttaatcgtcgcgaacttttggggcacggctggctgaaaatatcccggcgccacccccaactgaattatgacgccttgcgcattacaatggccgagatttcacttcgtcatggcgtcgtcctcgaggcgacgagccgagctgagcgcggcatctcggagcggccgatgacttttgcccagtatcgacgcctggagcggcagcaggccaatcaaattcgtttcgaggatattgatttcgaagaattctcgcctgggggaaacgacggagaaccggatcaatcttttaattcttcgtacggttcgctgcctcaaaacgtgtcagaaaacttgcgacgaaacggcggtctgcaatcggtgtctgaagtacgttcccgggcactgatcggatcgaacggcaacggtgtcacgcccgatcgtgtatcatctggaaacgattcccgttctcaatccggcagcgataaagcctttgtggacgatggcaacttgaggaacggccctctcaccatcgccggagacggccaggatcttgaaggccgttctggcatgcatcgtttggcaaccgaacccgtcacgcacacaacaagcgaagatgatgttcggcaacggcctcatcgaaaacggcctcgcggtgatgaggaagagcagagcggcgcaaaactgaccagggtagacggaattcggacgggagtgacaatcagcgccgtaccggttgcccaggacgatccgattacatcgccgatccagccccctggatcaaatccgttggatgacccggggcagaccaacatcgctacggacgcattgcctccgacagccgatcgccggcagcagggagagccaaattctaagcgtcctcgtgatgatgacgccgagccgagcattcgtaagcggtcaagggacgggcgcagccaaggggatgagggaaacagaaggtagaaaaggatcgatcatggcagatgaagaatttcgtcgagacttcagccgctccgctacgttgaactcgaataacgaaggcgctacaggcgcaccaatcccggatacatcggtgtcgactgccttccgacaaaaccgcagagaacacttaacgaccagttccttacggccattaattactggtggggccggcgaccttccaggcacttcccccgaaaatcaacggccgacaacccatgccccgaatacagcagaaatactcccggtgagatcagccgaagctccggctggccaatcagcggtctttccgaggagcaaggggtattttcgtacggccatgcaatacctgcgggagattgaaatgcagtccactgccagggcggaccacgaggcgacgtcgtcgtcacgttttggcaagggggaaagaaagcagctgcgcgaacacgagcaaaccggtgatcaaagtgaatcaatggcgaagcggagtaccagctcgggaatgcaggtgggaactattgccgcgtctttggctatgaaagatagctcgaccgcgacgccggcttcgcaagggccgcaccggtctgggatggagctggataatatcgaagggactggagagagccgtacgcaatctcagcacgaaattgcgacacaacctattgccacaagcgcttttggttcaggtcatgatgtgatcattcctggagagggccagcctgaagaaacattcgacggcgcaccatattggatggtagaaagcggggatagcgagaccaatagccttccgtcgatccaacaaggcttatcttggccagggttagatgaccttgatttgctcgccgacagcagttcaccgctcagtactcaggttgttcctcctgacgtagccgctacgaatttaagcactgaggcagggtccgccagcgtcgaaagcacccaaatcctcgccgacagtgcctattccgacgacgcgaccgaaaccggtggccaaacagcttcaggatcgatccatgaaggttcagttcgttcgcttggctcaccggaggaacgcttcgacgcctttcccgagttgaccgacgaggacttggcgcagattgacgcattctcgcgagcccgctctccttcgaggcgagatgctgcgcacgctattcatgcggtcagcttggatgatgccttctcacgcaaggatcttgccgcgggccacgacggccggcttacgaatcctgcgttccgtcaggaggcttctctgcaggaatcgagcccatcagaaacgaagtccgacgacttcccggaattaaccgacgaggacctggcacggatcgacgcactctccgaagcccgctcaacttcgaggctggatgttgcacgcactattcatgcggtcaggttggaggcctctcggcaggacccgagcccatcagaaatgaagtccgacgacttccccgaattgaccaaagaggacttagcccggatcgacgcactctctggaccccgcccgactacggggcgggaaggtgcgaacactattcagccagtcaggttggacgatgctttctcagccgaagattataccgtgggccgcggcggccggcatacgaatcctgcgttccatgaggaagcttctcggcaggacccgagcccatcagagatgaagttcgatggcttgccggagttgaccgacgaggatctggtaaggattgacgcaatctctgaaccgcgctcgaagagatctcgctccgagcaggttgtcgggggaaaatctcataggctcaaactgaacgaggctatcgaggaggcgggctcgcccactaccgtttcgggaacaagcgccgccagggcggcacctatcacgctcgaaagcggagtacctaggttgccgcaggctacccatacggaacttcctggctcggacgttgcgggtccactgcggatcgggaaggcgtcgtgtgccgatatacggcgagatgtttcggataaagggaaacgaaaagtctcgtcagattatcagattcagcaaggtcctggcgcgtcctatgcttaccagccgcgacgcatgccgacggaagcgattttcgatgctgaacggcttggtgacgaagtgctcatcgggaatgagccagttccgcggtggccttacccctgggagcacgttgttcgttttgaaacaggcaagcagctcttcgaaagattgcagaagtggccgactgcggaggagttggaaaacagtgtgatcctcgtcaaagcggatagcgcgcaacgatcctatatgccccgaaatcagctgctcttgcatctcggatccgaaaagtattacgaacgaatgaaagcgctcggtctatccgataataccttcagcggattgaagtccgatagcaaatatttttatgatacacctgctggaccacgggtaagtgaacatgattatgagttcccgcggcaggcaggcgtgcataatccagaggtgatggttcagcatcatagcggaaccttcttcgcgttttggccaaaacttctcaggctggaaaagcttgcgacagtaacgaatacgtatggcgcggaaaatgtttggctcaaatcgccagccaatgcttacatgacgccggaaacctataattccaaggttgcgaacggcgccgaaaaccttttcatcgagttcctacgtcccgctcctgtccacgaccacctgcgggaacctggaacttcaaacgcaaaaactgttgacggacgaaacgaagatcgcgcgcaacaggccgaccggttagcagatcagtcgatgggccggaacggggacggccgtgacgcgcagggtggtaagagaaccttggaaccgcgcgtgcgcgaaaggtatgggctgtagatccagctgcccgtaaagcaaacagccgtccaataggataaacggagcgtggtcacgtgatgaattcaggcaagtacacgccaataggcctggctgcgagcatagcatgttcattggccgtggggttttgtgcggccagtctctatgtcacatttcgccatggctttacgggcgaaacgatgatgactttcaacgtttttgcgttcctgtacgagacaccgccttatttgggatacgcaagtcctacgttctatcgcggactagccatcatcgttgcgacgtcaacgctcgtgttgctatgccaactactgttatcgatgcgcgagcgcgaacatcacggcactgctcgctgggccggctccggcgagatgcggcacgccaggtacctccggcgctacagtcacgtcacgggtcccatcttcggcaagacatgtggaccacgttggtttggcagctacctaagtaacggagaacaacctcacagccttgttgtcgcgccaactcgcgctggtaagggtgtcggcgtcgttatcccgacgttgctaaccttcaagggctcagtaattgccttggatgtgaaaggcgagctatttgaactcacatcgagggcgcgtaaatcaagtggcgacgcggttttcaagttctcgcccttagatccagagcggcgaacgcattgttacaatcccgtgctggatattgccgcgttgccgcccgaacggcgctttacagaaacgcgccgcctcgctgcgaatctcatcacagccaaaggcaagggagccgaaggtttcatcgacggggcacgggatcttttcgtagcaggcatattgagttgcattgagcgcggcacaccaacgatcggtgccgtttacgatctgtttgctcagccgggtgaaaagtacaaactatttgcgcaactcgcggaggaaacacaaaacaaagaggctcagcgtatcttcgacaatatggcggggaatgacaccaaaatcctgacatcctacacatcggtgctcggcgacggcggactcaatctttgggccgatccactcgttaaagcggctacaagcacctcggatttttccgtctacgatctgcggcggaagaggacttgtatttatctttgtgtcagcccgaacgatctcgaagtcatagcgcccttgatgcgtcttctcttccagcaggttgtatcaatcctgcagcgatcgctgccacttggagatgaacggcacgaagttctgtttctcctcgatgagttcaagcacttgggcaagctggaagctgtggagacggcaattacgacgatcgccggctacaagggccgcttcatgtttattattcagagtctttcggctttgacaggaacttatgatgaagctggtaagcaaaattttctcagcaatacgggtgtgcaggtattcatggcgactgctgatgacgagacgcccaactacatttccaaagctatcggcgactacacattccaggctcgctcaacgtcgtacagccaagcgcgcatgtttgatcataacatccaaatctccgaccaaggagcaccgcttttgcgcgccgaacaagtccgcctactcgacgacgattatgaaatagtccttatcaaaggccaacctcccctcaaactgagaaaagtgcgatattattcggatttcatattgaagcgaattttcgaaagccaacacggttcccttcccgagcccgcatctttgatgttgccgggagacacaaacctcgttgaaggcaagctcgaccagggaacagccgatacaacttcgcaaaaaccggtgcagattgaagagaacgaccatggggaagtcgtttccccccaaaacagaactgtggctgatggagtaatgccaatagaagttcgcccccgttcaaacgaagttgatgacgagcgggaataccaaggcgcggacgccgcaacctctgagaagcttccggaaattgctccggctcttttggcgcagcgcgaactcctcgaccagatcatttcgctccagctacgaggtagaacagcctccggcacttgaagctcgatgtgataccgcttcggatcgagtcttgttagcgccgtcagatgtcccgtttcgggaatgcattaccaacgttgaaggttgccaattgatgagacatcgccatgaaaccgtcgggaagctcaaaaactggatacgccgggtcggctagatcctcgccccaggttcgcgcaggggttacgcctgtccttcatcccaaagagccttggaaccgttttgcttgctccccatctgacggccaaatggatcaccgggaaaatttatctgcgcaattcgcttacgatggaatgagactgggcgcagccgagcggtccgcgtacgagacatgggatagagcggaccggccgagttggaaagacctgatactgagcgctcgcctgaacgcgattgacagtttcgcttggaatgtcgatgtcggagaaagtacctcttcaacttttgtttatgatggtgttcctctggcggaaggggaacggcatgcctacgaggaatgggtggagccgggacagcccagttggcaacaactcgttgtgaacgcgcgtattgaagagctaaacacctctgctgcaattccgaatgagtgtagtccccttcaagaggaattccgatcggaggcgcctaagcgtaagcggacaagctccattggtcaaaagaacggtttccctgaaccattcgaatttgatgggatgagactcggctcgcctgagcgcgaagcatatgagaattggagtaaaccgcaaccgccatcctggaaagacctgatagttgacgcccgtcttgacgcaatcgacacctccacctggctcaacgaatcaaatgacacctcggtcttcgagtacgaaggcgtcccgcttggggagggggaacgcctagcatatgaaaaatggctcgagcccgcgcaaccaggatgggaagacctggttgtggacgcacgcgttgcggaattgcaccagtctgctccgacgtggtgcgaacaccaaccaggcaacgacgtttcttccaacgagtccgggcgcatctcgggcgtcccaattaacgccgagcaggtgtcgcgtgcgttcttcgtgtacgatggagtggcgctcggagcagccgagcgcgctgcgcatgatcgttggagcaggccggaccggcccacctgggaagatcttatcatagtcgcgcgccaagctgctatcgaaggcggtgccgtttcgaatgggatgatcgggaagacatcttcctcagtctttttatacgagggaatgttgcttggggatgcggagcgtcaggcgtacggacggtggaggcagctagcccagccgcggtggcaaaatctggtggtgaacgcgcgcctggcagagctcgacccggcggcctggattcccgatgaacatgatccgtctgaggatggcggggcgactggtcttctgtcgcaagcaagcacgaccaataagtcccgcctcagtttaggtgatcaaccggaagcgcgctcgcctagtctcgcacgtgagccagcacaacagccgactcacgtgcaaaacctgacgtgcgcacaattggaagcaagacgtgctctatatttcgggccctctgggagggatgcagaccaaaccgccagcatcgccgacagtaatcgcctcgacgaggtaagcaaagttaaacggctgggtgccaagagccgtcgaggcgctaaagcaacggcctatgacgtaatttcaagtgcggaaagactgtcgtctcacgagggttgtttgacggttcagtccactcagccagaaaaagccgcttgctcgagaagcgacaatatcggcacttatggaagtcgaaaaaacgaacgagctcggcttgcgaccgagaccgggaaatacgagtcggagcatattttcgggttcaaggttgtccacgataccctgcgctcgaccaaagagggccggcggctggaaaggcctatgcccgcctatctcgaatgcaaggaacttcatcgacaacatgttggtacgggaagggggcggacccgactggtggggcgcggctggccagatgacgcaagttaccgctcggatcaaagggcaactctatcggaccctgttgcgtccacggaaggtgcaacggcgtcaaacgggtatcaattaaaccagctaggctacgcacaccagctcgctaacgacgggctgcagagcgaaacgccagatggggttatcatgccgcttcaggtcgcgactactagctacaactatacggtaagccgcgatccggtactttctccgcccagtaaagagcaagctccggaattgttgcaccttgggccacgtggccagacagaagctgtactcgctcgcgaaacagcattgacaggaagatggccaacacgcgagcgtgagcagcaagtctatcgagagtttttagccctttatgacgtcaagaaggacctggaggccaagacacttgggttgcggaagaaaaaagctgcgcttgtttccgcgttgaaccggactgccgcctcaataggcacttcacccttgaaagcccaatcgtcgagcgcagaagttgaaaaagcaactcacgagtttgatgaacgacgggtttatgatccgcgcgatcgcggtcgggacaaagcattacaacggtgacaaagctggagatgaccatcgttagcggactttgtatcgatgcttaaaaatgatggttcagcatttgaaccgcaggctgtactgctactctttgaaatcccccgcaaaaaacgcgccgtagtgcaatcgatcgccagggcctgaatttcagttgaaacacgatgtccattcaacgccttaagcgcaggtgttagacttcgcatatccttgatccgcgttggagtgtgagttatgctcgaagacggccagaaaatgcaggaacgcgagctttcggtcctcggtggtgataagaccgaaagtgcagccaccttaccgaatgacattttggtggaagttgccaaacatctgccgaccgacgatccagtcgaaacggcagccaacctcacaagctttaaacttgcgagcccgtcggttcgggcatcggtcgatcagagcgatgtcggaacgttccaccgaagcgtaaatcgactgggtgcctcaagcaaggcattgtatgacctggctgtaccccggaacggctttgccgagtatccgaactatccggaaccggaccctgctggcgagtttgcgctggcgagccagcgcatcaggacaattggtccaactttgaagttccaatcgcccgccaggaaaacagcgatcgtcaatcacattctcaatatgtcggaaggcggtgagcaggcggaggcgattatgtcgatgacgtcccatttgagtgacctcgagagggccgacaagagacgccttatcgacagagcaattgaatacttcaaggtagacgggcctatcaactacgacagtcgccattatgcagcctacgcgattgcagcggcgcacaaccagttggaactcgaacacaagtcacaaatcttcgatgcaatggcgaagagaccccagcttgcgagactctacgccgacgaacgcatccatgcgcaggagcatttggggcttgcgtcgacatccgaaggtccgcacgagcggagcaataaacaactggccacggacattcttcagatcgaacaaaaaatccgcactgagctccttcccgaaactctcagtgctcacgaccagatggtaaaagcggaaggaatcgctggatcgattgagaaggcttaccgcgatgctcgcgcgaacttaacccgggcaccgcgagggaggtcaaattctgatctcagccggtagaacttggtctgaatattcgattatttctccgacgaaagcacttggttgacgagcgaatttttaaacgagcatcgataaagcgtgcacagggaaggcccacctaatggtcagtataaataaaaaagccccgcagaaatcttctacagcgaccacgcgcaattctgatgaacgcctggttgatcagttagggcaggcgtaccttgtggaacgcgaggcgcaggaaaggcgcgcgcgacttgaagcgccgccggcgttgaaaaaatatgcctcgaaactgcaactcctcaataagctcgatgcagatttccgtggtgtgatcgcccacaagccgtttcgcagcgagcaactgcgggtcgatagcaatggagaattgacccatagtcggggtctcataaaaaagaagaagaaggttttcattcgagatcaaacaactggctcccttcggcttattcactacgagaggtctgactggaatagtgtccgtcgctatgactacgaccagaacggcgtgttgagcgagaaacatatcaaaagcaaagccggtgccttcgaagaaaaatgggagcgggacgaaaacggtgaactgatgcgcacccgatacatcgatcggcgcagacttactggacgggcgttgcatcccatttccgaggaaatcggacgtccttatgagagtggcctggagaagaggctttatcgcgttttaacgcgtcgggagggctcccaacaaaagactttcgaacgcgatgacaagggtaatctggagctcattgcaagcaaacggatgggctattcgatgtcttcacaaaaggcaccggatcgacaaacatctagaacaagtatccgcaagcttggcggagctttcagtgaatcatatagatcccggctggataaggacggccacgagttaggtcgggatgtctccgcacatcgaagcctcctcaacaagcgttcagccgtctacgatgacgctacaggggagctaaagagcagcaagcacacgtttgggaagatatacaaagcggaagcgacatacctgaacgccgaaatcaaagaggtctccaaaaaaatcctcggagttacggtcggtaaagaattgaagacattaagtggacgcgaactcgaggctcaagtattacgtgccgcggaacgtgccctccataaacaggcctggcagcacccttcagctaacccctcgcggtcgcagcgggaaaataccaacagtcatcttggaaacgaacttgatgggccgctcgaatcggatatgaccgtcgtccatcaagccggatccgggttcgtcggcgacgatcgccacgttcatgatggcggtggatccaggttgaatgaattgcacgaatcgcgatcgtcgaatgatagggaaaagcttagttcgccgagagccgaaatttgcgaccgctcgatgaatcgggatcgcaccggctcaggtactttgtcgcgatgatagctaaactaggggggcacacaccgagttgtcaagtcgccccccggcaaatgagctcatccctgctgccatattcccaaactaccaacgtttcgcgtcaaactaggttcgcctaaaggcatgaaagtcgcgtttcaacgaacaggctcgatcgaaccagcgacccaacgttaatgattacaaactgcaaaccgtaacccttaaaggtaaacatttccaaagtttcatttgtagcgattttgaatttttcatgtgtagaagcgttcctgatatcaagttatagtcctcgcaatcgatccaccatagaaagattgctcatctgagcttaaggaattcaattcttcctcagatatacttggagccacgcgggccatctaactgacttctaggttttgatgaacaccatgtcccctcaatggctttgagaccgcaccggatgctcattgagttttgaaatcagcaccgttaccgaactttccatcctggctggctgatcacacacgattggaaagcgaggggaataggagtggcaagcatgccaaccgacgacattgtaatgtccgatcccggaatggctgctgttgacacgtctgtccctacgcgcttccagacagatcttcgccagttcagtaacctgctggacgagagcaatattgtggaatgggtcgtaaaccacgccgcaaatcgcaatgcgtgcttcggacaagaccaacttaagatttcggcggctcgggcactcacgcactacaaacggccggtacaagaaatcgacctgctattccaacaggtcgtcgcaagcgacaaactgacccggcttgattctccagatggccaacctctctacacctctacagagctgagagctgcggaacagaatactgtacgtcatgtcaccaatctttccgcagaagaaagcttcggcgttccgggaaccattgttgatatggtcgccgatagaggcattttcacaccggagctcagaggagcattacattatctgtctaggcgaaatcgagcttccactatggtgggcgtagcgggttccgcaaaaacaagtgtacttggagccctgaacgaagcggtggacaggttcaacgaggaagcgctcccgaccgagaaaataaagttgattgccttcgtacccaccaaccgggcggcccaggagcttcgtgagaaaggtcttcgcgacgtcgcgacgactttcaaggcgaaagaccgcaccatcggaaaaaataccatcgtcgtgatcgacgaaatgtcgatggccaagacgcaggagatcgcgcaactaatcgagacagttgcaaatgccacttcctatcacccaaccgaaaggccgaaactgatatgtgtgggagacgatcggcaactgccccctgttggacctggtgatctgcttccgattattatggagcaagccggctgctatgaactcgtccagccgcttcgacagctcgacgcgcggtcgcgaatagaaacagaaaagctcggacgtgacatacgacgcgatgccaagagcgccgtcgggcactatctcacagcgctcgaacaaatgggcctcgtccatttcgtatatgctcctcctagcggctcaaacgtcagggcgtcagaccagatcactgaccgcatgctggaggagatgaatagagtttgcgaccgatatccggtgtatgatcgtcttgtgatggcacactccaacaggagcgttaatcgcgccaatatcgctcttcatcagaggtttgttgacaaatccggattgcaagaccagcaaatgagtgtgtggtcaagcgtaatagatagtggaagttcggaatctggaatagatgagggttcgtcgagacgcgttcagcaaaggattaatctcgtcttgggagacaggattatattcagcgaaaaccgtctgcaagcggacatccgcaatggtacttttgcaactgtagtcggacttaatagcacagaagcttcccgagctgagaatggcacatctgctggggttcgcattactgcaaggttagacggatctggacgaaccgtcacttggaccgatagcgagtttaagggttttacctacggctatgctgctacaatttataagagtcagggggccacagttgatcacgccattctcctctgtgatggtgctctttcagataagctgacctatgtcggcctgacgaggcatcgcagtcgtctcgacgtcattgcttctcccctcgtggcaaacaatgttgaggctctcagtgcaaagctcactcagcaaagcgcgccaaataattccattcaattcccagcgctcgaacctgctgccttccaagagcgctcgtcggtttcgaacgcgcacttgctaaggccgctcgaccagatggaaatctctccaacgacgccgctttccttccaaggcagacaagaaagctccttcggggagaaccagctgcacgaaccatccacatcggatgtggaaatgccggaaagcgcggacctttacccgagcgccattgacttcgaagttttccagtcttctgtcatcacgactgaagagcaaatgcaaccggaattctgcgggtcggaatcgacggctaacacctcagcccacgaaagccaccaagtcacgatcgcaacggtaacaaacctggggatagcgatcgagaaacggaaacgagcggcggcaaaggaagaaatcgattctcgcaaaaaaatggcccgtcactcagttagttctgccgaggaagttgaagatatcacttccctgttcgaacgattgaaactggcaacctcggtcaccaacacagttcaaccgacgtatgcggacgtcgatcatatcatcggtactgatggccgagtgggtccaataccgcaccgggaagatgatccgggatcaaattgggaattgtcgtcaacgaacgccccctcaaacgtctcagagaaacgatcgaccaaagactcaggagaaaaaaatatggcttcgaatgaccagaaaatgcaaggcgctgactctgcaggcagcgagcgtcatttttcgcagacttccattgtggaagccctgcaggctggcgatcacaagaagctcgtggaaacgctcgccgcaaccggctcccttgtcgagaaggcggacgccgggtcggcgctgaaagcaatggcggatgcttacgaaagggatatcaaggcagatcccgaaaaggtccgcatgctctatgccaatcggcgcgttgatgtagatgcgctggccaaggagatcgaaaaacagggccttgcatccggtcgcctgagtggcgaccctgtcagcttcaaggcgttcaacaacaaggatatccgtttcagggtcggcgacaggctcagcgtcaccagcagctacaggaatctcattgccggtgaagccggccggatcgaaaagatcgaaggcaaatccgttaccttcaaacccgatggcagcagtcagagcaagaccttcgaggccagcaccggcgagccgggtgacaggggcgtcaagggctacaaaatcgaaggcccgatgacggtcatcggctccgcctatgaacttacgcgacatgatgacggcaaacgtgttgaccaaatctatctcttgaacgacgctgcccatggcatcaacgccaatagcgctttgctgagcaaggccgacgagcggacgcagcttttcacttcgctcaaggacaccgccgacagggacatcttggccaggcaactgggaaagccgggcagcgagctctaccaggacaaattcccagccttgccggactacacagccgccatcgatcggattgcaaaacgccaggaagttgtcgcggcacgtggcgaggagaaaacttccgccccgatagacctggcgccccaaacgccgcccgacgctgccgatgcggcagtcaataaccagaaaagaatcgtcgaggccttgcaggcaggcgaccacaagaagcttgtggaaacgctagccgcaaccggctcccttgttgagaacacaaatctcgtatcaacgttgaaagcgatagcgcagacttatgaaagagacattagtgcggaccccgagaaagtccgcgctctctacgccaacaaacgtgatcatgtagatttgcttgccgaagagatcgaaaagcagggccttgcatccggtcgcctgagtggcgaccctgtcagcttcaaggcgtttaacaacaaggatatccgtttcagggtcggtgacaggctcagcgtcactagcagctataggaatctcattgccggtgaagccggccggatcgaaaagatcgaaggcaaatccgttaccttcaaacccgatggcagcagtcagagcaagaccttcgaggccagcaccggcgagccgggtgacaggggtgtcaagggctataagattgaggggcccacgacaatcatcggctccgcctacgaaatcagaaatcacgacgatggcaggcgcgtcgatcaggtttatgtcttgcacagtgccattttcggctcaaatgccgcgagcgccctgttgagcaaggccgacgaacgaacccaggttttcaccgtgcaaagcgacacggctgacagacacatcttggccagccaactcagcaagcctggcagcgagctctatcaggacaaattcccagtctcgccggactacgcagccgcgatcgaccggatcgcgaaacgcgaggaacttagggccggacgtggcgaggaaagtcctactgttcaaatggagccggtgaaccaaacgccctacgaggcgggacattggacgcctgacagtcaaaaatctgtggtggaagccctgcaggctggcgatcacaagaagctcgtggaaacgctcgccgcaaccggctcccttgtcgagaaagcggacgccgggtcggcgctgaaagcaatggcggatgcttacgaaagggatatcaaggcagatcccgaaaaggtccgcatgctctatgccaatcggcgcgttgatgtagatgcgctggccaaggagatcgaaaaacagggccttgcatccggtcgcctgagtggcgaccctgtcagcttcaaggcgttcaacaacaaggatatccgtttcagggtcggcgacaggctcagcgtcaccagcagctacaggaatctcattgccggtgaagccggccggatcgaaaagatcgaaggcaaatccgttaccttcaaacccgatggcagcagtcagagcaagaccttcgaggccagcaccggcgagccgggtgacaggggcgtcaagggctacaaaatcgaaggcccgatgacggtcatcggctccgcctatgaacttacgcgacatgatgacggcaaacgtgttgaccaaatctatctcttgaacgacgctgcccatggcatcaacgccaatagcgctttgctgagcaaggccgacgagcggacgcagcttttcacttcgctcaaggacaccgccgacagggacatcttggccaggcaactgggaaagccgggcagcgagctctaccaggacaaattcccagccttgccggactacacagccgccatcgatcggattgcaaaacgccaggaagttgtcgcggcacgtggcgaggtcaagccgattgagcgcaccgaagcgcccgaaataccccaggttcaagctactatcgttggcgagacctcgatcattcggttgcccgatcggataaaaaccaatcgcgagaagccccaagaacttgatgtagtctcgaaagaagggcacgaaactacaggtagtctgaggcagagtgtccaagagagtaatgcagcaccaaaacagacttcgccgaaggcggcaaatgacgtggatcggctgacacgggattttgacgagcgcatccgcgtccgcggggatggacgtggactctaagtaaaagagggtgcgtaacgcgcaccctcttccactcgctgtccctgtatccgttctctgtcgcgagaacgtcgatcaccttttcggaactctttccagatctgcttgaggttccgttgccggagaaagcattggcgaggattgctgggatccggcggacggcgatgcgatgtgccggttcggtgaccaattccatcagagaccggccgacgtatggcctgccgaagtggaaacggctgatcagcttgcgaggccgagctacttccccggcaagcgtcgggttcggggcattgttttcctcgaccatggcggtattttgctgagttgcccggctaaactaggctttggcagcctgttctttgaactatgtacctcgcgaatgcatctagatccaatccaatatgcatggcatgccgaatccatgtgggagtttattcttgacacagatatttatgatataataactgagtaagcttaacataaggaggaaaaacatatgttacgcagcagcaacgatgttacgcagcagggcagtcgccctaaaacaaagttaggtggctcaagtatgggcatcattcgcacatgtaggctcggccctgaccaagtcaaatccatgcgggctgctcttgatcttttcggtcgtgagttcggagacgtagccacctactcccaacatcagccggactccgattacctcgggaacttgctccgtagtaagacattcatcgcgcttgctgccttcgaccaagaagcggttgttggcgctctcgcggcttacgttctgcccaagtttgagcagccgcgtagtgagatctatatctatgatctcgcagtctccggcgagcaccggaggcagggcattgccaccgcgctcatcaatctcctcaagcatgaggccaacgcgcttggtgcttatgtgatctacgtgcaagcagattacggtgacgatcccgcagtggctctctatacaaagttgggcatacgggaagaagtgatgcactttgatatcgacccaagtaccgccacctaataatgtctaacaattcgttcaagccgacgccgcttcgcggcgcggcttaactcaagcgttagatgcactatacgtaccaatccaaatcggatccccctgcagggctgagataggtgcctcactgattaagcattggtaactgtcagaccaagtttactcatatatactttagattgatttaaaacttcatttttaatttaaaaggatctaggtgaagatcctttttgataatctcatgaccaaaatcccttaacgtgagttttcgttccactgagcgtcagaccccgtagaaaagatcaaaggatcttcttgagatcctttttttctgcgcgtaatctgctgcttgcaaacaaaaaaaccaccgctaccagcggtggtttgtttgccggatcaagagctaccaactctttttccgaaggtaactggcttcagcagagcgcagataccaaatactgtccttctagtgtagccgtagttaggccaccacttcaagaactctgtagcaccgcctacatacctcgctctgctaatcctgttaccagtggctgctgccagtggcgataagtcgtgtcttaccgggttggactcaagacgatagttaccggataaggcgcagcggtcgggctgaacggggggttcgtgcacacagcccagcttggagcgaacgacctacaccgaactgagatacctacagcgtgagctatgagaaagcgccacgcttcccgaagggagaaaggcggacaggtatccggtaagcggcagggtcggaacaggagagcgcacgagggagcttccagggggaaacgcctggtatctttatagtcctgtcgggtttcgccacctctgacttgagcgtcgatttttgtgatgctcgtcaggggggcggagcctatggaaaaacgccagcaacgcggcctttttacggttcctggccttttgctggccttttgctcacatgttctttcctgcgttatcccctgattctgtggataaccgtattaccgcctttgagtgagctgataccgctcgccgcagccgaacgaccgagcgcagcgagtcagtgagcgaggaagcggaagagcgcctgatgcggtattttctccttacgcatctgtgcggtatttcacaccgcatatggtgcactctcagtacaatctgctctgatgccgcatagttaagccagtatacactccgctatcgctacgtgactgggtcatggctgcgccccgacacccgccaacacccgctgacgcgccctgacgggcttgtctgctcccggcatccgcttacagacaagctgtgaccgtctccgggagctgcatgtgtcagaggttttcaccgtcatcaccgaaacgcgcgaggcagcagatctatcgatggtacctatctgcagacggaagggattcctgttaattaaaacagcttgcgtcatgcggtcgctgcgtatatgatgcgatgagtaaataaacaaatacgcaaggggaacgcatgaaggttatcgctgtacttaaccagaaaggcgggtcaggcaagacgaccatcgcaacccatctagcccgcgccctgcaactcgccggggccgatgttctgttagtcgattccgatccccagggcagtgcccgcgattgggcggccgtgcgggaagatcaaccgctaaccgttgtcggcatcgaccgcccgacgattgaccgcgacgtgaaggccatcggccggcgcgacttcgtagtgatcgacggagcgccccaggcggcggacttggctgtgtccgcgatcaaggcagccgacttcgtgctgattccggtgcagccaagcccttacgacatatgggccaccgccgacctggtggagctggttaagcagcgcattgaggtcacggatggaaggctacaagcggcctttgtcgtgtcgcgggcgatcaaaggcacgcgcatcggcggtgaggttgccgaggcgctggccgggtacgagctgcccattcttgagtcccgtatcacgcagcgcgtgagctacccaggcactgccgccgccggcacaaccgttcttgaatcagaacccgagggcgacgctgcccgcgaggtccaggcgctggccgctgaaattaaatcaaaactcatttgagttaatgaggtaaagagaaaatgagcaaaagcacaaacacgctaagtgccggccgtccgagcgcacgcagcagcaaggctgcaacgttggccagcctcgcagacacgccagccatgaagcgggtcaactttcagttgccggcggaggatcacaccaagctgaagatgtacgcggtacgccaaggcaagaccattaccgagctgctatctgaatacatcgcgcagctaccagagtaaatgagcaaatgaataaatgagtagatgaattttagcggctaaaggaggcggcatggaaaatcaagaacaaccaggcaccgacgccgtggaatgccccatgtgtggaggaacgggcggttggccaggcgtaagcggctgggttgcctgccggccctgcaatggcactggaacccccaagcccgaggaatcggcgtgagcggtcgcaaaccatccggcccggtacaaatcggcgcggcgctgggtgatgacctggtggagaagttgaaggcagcgcaggccgcccagcggcaacgcatcgaggcagaagcacgccccggtgaatcgtggcaagcagccgctgatcgaatccgcaaagaatcccggcaaccgccggcagccggtgcgccgtcgattaggaagccgcccaagggcgacgagcaaccagattttttcgttccgatgctctatgacgtgggcacccgcgatagtcgcagcatcatggacgtggccgttttccgtctgtcgaagcgtgaccgacgagctggcgaggtgatccgctacgagcttccagacgggcacgtagaggtttccgcagggccggcaggcatggccagtgtgtgggattacgacctggtactgatggcggtttcccatctaaccgaatccatgaaccgataccgggaagggaagggagacaagcccggccgcgtgttccgtccacacgttgcggacgtactcaagttctgccggcgagccgatggcggaaagcagaaagacgacctggtagaaacctgcattcggttaaacaccacgcacgttgccatgcagcgtacgaagaaggccaagaacggccgcctggtgacggtatccgagggtgaagccttgattagccgctacaagatcgtaaagagcgaaaccgggcggccggagtacatcgagatcgagctagctgattggatgtaccgcgagatcacagaaggcaagaacccggacgtgctgacggttcaccccgattactttttgatcgatcccggcatcggccgttttctctaccgcctggcacgccgcgccgcaggcaaggcagaagccagatggttgttcaagacgatctacgaacgcagtggcagcgccggagagttcaagaagttctgtttcaccgtgcgcaagctgatcgggtcaaatgacctgccggagtacgatttgaaggaggaggcggggcaggctggcccgatcctagtcatgcgctaccgcaacctgatcgagggcgaagcatccgccggttcctaatgtacggagcagatgctagggcaaattgccctagcaggggaaaaaggtcgaaaaggtctctttcctgtggatagcacgtacattgggaacccaaagccgtacattgggaaccggaacccgtacattgggaacccaaagccgtacattgggaaccggtcacacatgtaagtgactgatataaaagagaaaaaaggcgatttttccgcctaaaactctttaaaacttattaaaactcttaaaacccgcctggcctgtgcataactgtctggccagcgcacagccgaagagctgcaaaaagcgcctacccttcggtcgctgcgctccctacgccccgccgcttcgcgtcggcctatgcatataattgtggtttcaaaatcggctccgtcgatactatgttatacgccaactctgaaaacaactttgaaaaagctgttttctggtatttaaatcggaaccctaaagggagcccccgatttagagcttgacggggaaagccggcgaacgtggcgagaaaggaagggaagaaagcgaaaggagcgggcgctagggcgctggcaagtgtagcggtcacgctgcgcgtaaccaccacacccgccgcgcttaatgcgccgctacagggcgcgtactatggttgctttgacgtatgcggtgtgaaataccgcacagatgcgtaaggagaaaataccg

SEQ ID NO: 43 - DNA, 18676 bp, Artificial Sequence
  Synthetic construct containing Agrobacterium tumefaciens VIR genes
gcatggcatgccgaatccatgtgggagtttattcttgacacagatatttatgatataataactgagtaagcttaacataaggaggaaaaacatatgttacgcagcagcaacgatgttacgcagcagggcagtcgccctaaaacaaagttaggtggctcaagtatgggcatcattcgcacatgtaggctcggccctgaccaagtcaaatccatgcgggctgctcttgatcttttcggtcgtgagttcggagacgtagccacctactcccaacatcagccggactccgattacctcgggaacttgctccgtagtaagacattcatcgcgcttgctgccttcgaccaagaagcggttgttggcgctctcgcggcttacgttctgcccaagtttgagcagccgcgtagtgagatctatatctatgatctcgcagtctccggcgagcaccggaggcagggcattgccaccgcgctcatcaatctcctcaagcatgaggccaacgcgcttggtgcttatgtgatctacgtgcaagcagattacggtgacgatcccgcagtggctctctatacaaagttgggcatacgggaagaagtgatgcactttgatatcgacccaagtaccgccacctaataatgtctaacaattcgttcaagccgacgccgcttcgcggcgcggcttaactcaagcgttagatgcactatacgtaccaatccaaatcggatccccctgcagggctgagataggtgcctcactgattaagcattggtaactgtcagaccaagtttactcatatatactttagattgatttaaaacttcatttttaatttaaaaggatctaggtgaagatcctttttgataatctcatgaccaaaatcccttaacgtgagttttcgttccactgagcgtcagaccccgtagaaaagatcaaaggatcttcttgagatcctttttttctgcgcgtaatctgctgcttgcaaacaaaaaaaccaccgctaccagcggtggtttgtttgccggatcaagagctaccaactctttttccgaaggtaactggcttcagcagagcgcagataccaaatactgtccttctagtgtagccgtagttaggccaccacttcaagaactctgtagcaccgcctacatacctcgctctgctaatcctgttaccagtggctgctgccagtggcgataagtcgtgtcttaccgggttggactcaagacgatagttaccggataaggcgcagcggtcgggctgaacggggggttcgtgcacacagcccagcttggagcgaacgacctacaccgaactgagatacctacagcgtgagctatgagaaagcgccacgcttcccgaagggagaaaggcggacaggtatccggtaagcggcagggtcggaacaggagagcgcacgagggagcttccagggggaaacgcctggtatctttatagtcctgtcgggtttcgccacctctgacttgagcgtcgatttttgtgatgctcgtcaggggggcggagcctatggaaaaacgccagcaacgcggcctttttacggttcctggccttttgctggccttttgctcacatgttctttcctgcgttatcccctgattctgtggataaccgtattaccgcctttgagtgagctgataccgctcgccgcagccgaacgaccgagcgcagcgagtcagtgagcgaggaagcggaagagcgcctgatgcggtattttctccttacgcatctgtgcggtatttcacaccgcatatggtgcactctcagtacaatctgctctgatgccgcatagttaagccagtatacactccgctatcgctacgtgactgggtcatggctgcgccccgacacccgccaacacccgctgacgcgccctgacgggcttgtctgctcccggcatccgcttacagacaagctgtgaccgtctccgggagctgcatgtgtcagaggttttcaccgtcatcaccgaaacgcgcgaggcagcagatctatcgatggtacctatctgcagacggaagggattcctgttaattaaaacagcttgcgtcatgcggtcgctgcgtatatgatgcgatgagtaaataaacaaatacgcaaggggaacgcatgaaggttatcgctgtacttaaccagaaaggcgggtcaggcaagacgaccatcgcaacccatctagcccgcgccctgcaactcgccggggccgatgttctgttagtcgattccgatccccagggcagtgcccgcgattgggcggccgtgcgggaagatcaaccgctaaccgttgtcggcatcgaccgcccgacgattgaccgcgacgtgaaggccatcggccggcgcgacttcgtagtgatcgacggagcgccccaggcggcggacttggctgtgtccgcgatcaaggcagccgacttcgtgctgattccggtgcagccaagcccttacgacatatgggccaccgccgacctggtggagctggttaagcagcgcattgaggtcacggatggaaggctacaagcggcctttgtcgtgtcgcgggcgatcaaaggcacgcgcatcggcggtgaggttgccgaggcgctggccgggtacgagctgcccattcttgagtcccgtatcacgcagcgcgtgagctacccaggcactgccgccgccggcacaaccgttcttgaatcagaacccgagggcgacgctgcccgcgaggtccaggcgctggccgctgaaattaaatcaaaactcatttgagttaatgaggtaaagagaaaatgagcaaaagcacaaacacgctaagtgccggccgtccgagcgcacgcagcagcaaggctgcaacgttggccagcctcgcagacacgccagccatgaagcgggtcaactttcagttgccggcggaggatcacaccaagctgaagatgtacgcggtacgccaaggcaagaccattaccgagctgctatctgaatacatcgcgcagctaccagagtaaatgagcaaatgaataaatgagtagatgaattttagcggctaaaggaggcggcatggaaaatcaagaacaaccaggcaccgacgccgtggaatgccccatgtgtggaggaacgggcggttggccaggcgtaagcggctgggttgcctgccggccctgcaatggcactggaacccccaagcccgaggaatcggcgtgagcggtcgcaaaccatccggcccggtacaaatcggcgcggcgctgggtgatgacctggtggagaagttgaaggcagcgcaggccgcccagcggcaacgcatcgaggcagaagcacgccccggtgaatcgtggcaagcagccgctgatcgaatccgcaaagaatcccggcaaccgccggcagccggtgcgccgtcgattaggaagccgcccaagggcgacgagcaaccagattttttcgttccgatgctctatgacgtgggcacccgcgatagtcgcagcatcatggacgtggccgttttccgtctgtcgaagcgtgaccgacgagctggcgaggtgatccgctacgagcttccagacgggcacgtagaggtttccgcagggccggcaggcatggccagtgtgtgggattacgacctggtactgatggcggtttcccatctaaccgaatccatgaaccgataccgggaagggaagggagacaagcccggccgcgtgttccgtccacacgttgcggacgtactcaagttctgccggcgagccgatggcggaaagcagaaagacgacctggtagaaacctgcattcggttaaacaccacgcacgttgccatgcagcgtacgaagaaggccaagaacggccgcctggtgacggtatccgagggtgaagccttgattagccgctacaagatcgtaaagagcgaaaccgggcggccggagtacatcgagatcgagctagctgattggatgtaccgcgagatcacagaaggcaagaacccggacgtgctgacggttcaccccgattactttttgatcgatcccggcatcggccgttttctctaccgcctggcacgccgcgccgcaggcaaggcagaagccagatggttgttcaagacgatctacgaacgcagtggcagcgccggagagttcaagaagttctgtttcaccgtgcgcaagctgatcgggtcaaatgacctgccggagtacgatttgaaggaggaggcggggcaggctggcccgatcctagtcatgcgctaccgcaacctgatcgagggcgaagcatccgccggttcctaatgtacggagcagatgctagggcaaattgccctagcaggggaaaaaggtcgaaaaggtctctttcctgtggatagcacgtacattgggaacccaaagccgtacattgggaaccggaacccgtacattgggaacccaaagccgtacattgggaaccggtcacacatgtaagtgactgatataaaagagaaaaaaggcgatttttccgcctaaaactctttaaaacttattaaaactcttaaaacccgcctggcctgtgcataactgtctggccagcgcacagccgaagagctgcaaaaagcgcctacccttcggtcgctgcgctccctacgccccgccgcttcgcgtcggcctatgcatataattgtggtttcaaaatcggctccgtcgatactatgttatacgccaactctgaaaacaactttgaaaaagctgttttctggtatttgacccgcgaggtttctcgcttcaattgaaatcataaagaagcaattgaaaattttcgagtaaccgaccctcccgataatcttcaacataaaacaacgcacttcttccaacgggagaggcggtgttagttgcgagctaaggagataaggtatgcttaagagatcggggtcgctttctcttgccttgatggtctccttctgttcgtcgagccttgccacgccactctcatctgctgagtttgaccatgttgctcgcaagtgtgccccatcagttgcgacatctacgcttgcggcgatagctaaggtggagagtcgctttgatcctttagcgattcatgacaacacgaccggcgaaacgcttcactggcaagatcacagccaagcaacccaagtcgtcaggcaccgtctcgatgcacggcattcgctggatgttggcctcatgcaaataaactctcgaaatttttctatgctcggtctgacacctgacggtgcgctccaggcgtgcacatcattatctgccgctgcaaacatgctgaaaagtcgttatgcaggcggcgaaacgattgacgagaagcaatttgcgcttcgtcgggcgatctccgcttacaacaccggtaatttcatcggcggttttgcaaacggctacgtgcgaaaagttgaaacagctgctcaatcgctggtgcccgcgttaatcgagcctccaaaagacgatcacgaggcgctaaaatccgaagagacgtgggatgtttgggggtcatatcagcgccgctcgcaggaggatggcgctggcggtttaatcgctccgccaccgccacaccaggacaacggcaaatccgcagacgacaatcaagtcttattcgacttatactaaggaggtgcgcattgatgcgatgctttgagagataccgtttacatctaaatcgcctctcgctctcgaatgcgatgatgcgcgtgatatcgagctgcgccccaagcttgtgcggtgcaattgcatggagcatttcctcatccggacccgccgcagcgcaatctgcgggtggcggcactgaccccgccacaatggttaacaatatatgcacgtttatccttggtccgttcggccagtcactcgctgttctcggcattgtcgctatcgggatctcctggatgttcgggcgggcttcgcttgggctggttgccggcgtcgtcggcggcattgttatcatgtttggggcgagcttcctcggccaaacgctcactggcggtagttgatggctgatcgtttggaagaatcgaccctttacctcgcagccacacggcccgcattgtttcttggggtgccactgacattggcagggttattcatgatgttcgccggctttgtcatcgttatcgttcagaacccgctctacgaagtcgttctcgtgccgttatggtttgcagcccggctcatcgtggagcgagactacaatgcggcgagcgtcgtcctgctatttttgcggaccgcgggaagaagcattgatagtgcagtttgggggggcgctactgttagcccaaatccaattagggttcccccacgagggagaggaatggtgtgatgctcggcgcgagtggaacgaccgaaagatccggtgagatctatctcccttatattggccacctcagcgaccatatcgtccttcttgaagacggatcgatcatgaccattgcgagaattgatggcgttgcattcgagcttgaggaaactgaaatgcgcaatgcgcgttgtcgtgcgttcaacacgctgttgcgcaatatcgctgatgatcatgtgtcaatatatgctcacctcgtacgtcatgccgacgtgccatcatcggcgccgcgacacttccgtagtgttttcgccgctagcctgaacgaagcttttgaacagcgcgtgctctccggccaactcctccgcaatgaacacttccttacgttgattgtctacccacaggcggctttagggaaggtaaagaggaggttcaccaagctaagcggaaaaagggaaaacgatctcacgggccagatcaggaacatggaagatctttggcatgttgtcgctggctctcttaaagcgtatggcctgcatcgtcttggcatccgcgagaagcagggtgtgctcttcaccgaaattggcgaagcgctacggttgatcatgactggtcggttcacaccggttccggtcgtcagcggctcactcggcgcttcgatttataccgacagagtcatttgcggcaagcgaggactcgagatcagaacgccaaaagacagttacgttggatccatctattcgtttcgcgaataccctgcaaaaacacggccgggcatgctcaacgcgctgctatccctcgattttccacttgttctcacgcagagtttttcgttcctgactcgcccgcaagcgcacgcgaaacttagcctcaaatcgagccagatgctgagttccggcgataaagccgtgactcaaatcggcaaattatccgaggctgaggacgcacttgcgagcaacgaattcgttatgggctcacatcatttgagcctttgcgtctatgcagacgatctcaatagtcttggggacaggggcgcgcgggctcggacacgaatggcggatgcaggtgccgtggttgtccaagaaggtattggtatggaagcggcctattggtcccaattgccggggaattttaagtggcgcacacgccctggcgcaatcacttcacgcaatttcgcagggtttgtctctttcgaaaactttccagagggcgccagctcaggccactggggcaacgcgattgcccgatttcgtaccaatggcggaacgcctttcgactatatcccgcatgagcacgatgttggcatgacggcaatattcgggcctatcgggaggggtaagacgacgctcatgatgtttgttctagccatgctcgaacagagcatggtcgaccgtgcaggtacggtcgtgttctttgacaaggaccggggtggcgaattgctggttcgcgccacaggaggaacatatttggcacttcacagaggcacacccagcgggttggcgccgttgcgtggcctagaaaacacagcagcctcacacgattttctgcgcgaatggatcgtggctctcatcgagagtgatggtcggggtgggatttctccggaagagaaccgccgtctggtccgtggtatccatcgtcagctctcgtttgatccacaaatgcgttcaatcgcggggttacgtgaatttttgttgcatgggcccgccgaaggcgcaggagcgcggctccaacgctggtgccggggccatgcgcttggctgggcatttgacggcgaagttgacgaagtaaagttagatccgtcgattaccggcttcgacatgacgcatcttctcgaatacgaggaagtatgcgctcccgctgcagcatatctcctgcatcggattggagccatgatcgacggccgccgttttgtgatgagctgcgatgagtttcgcgcctatttgttaaaccctaaattttcgactgtcgtcgacaaattcctcctgaccgttcgaaaaaacaacgggatgctaatactggcaacgcagcaaccagagcatgttctggaatcgccgctaggagccagcttggttgcgcaatgtatgacgaagattttctatccatcaccaaccgcagatcgatcggcttatgtcgatggactgaaatgtaccgaaaaggaatttcaggcgatccgtgaagacatgacggtcggcagccgtaagtttcttcttaaacgagaaagtggaagcgtcatctgcgaatttgatctgcgggatatgcgtgaatatgtcgccgtgctttcggggcgtgccaacacggtgcgctttgcaactcgactacgcgaggcacaagaaggcaactcatctggctggctcagcgaattcatggcccgtcaccacgaggcagaagattgataaggtaggaaacgatgaagacgacgcaacttattgcaacagttttgacctgcagctttctatatattcagcccgcgcgggcgcagtttgttgttagcgacccggcaacggaggctgagacgctcgcgactgcgctcgcgactgcggagaatctcactcagactatagcgatggttacgatgttgacgtcggcctacggcgttactggactactgacttcgctcaaccagaaaaatcagtatccttcgacgaaggacctagacaatgaaatgttttcgccgcgaatgccaatgtcgaccacggcacgtgcgatcaccagcgatacagatcgtgcagtcgtgggtagtgatgctgaagcggacctgttgcgatcgcagatcaccggttccgcaaacagcgctggcattgcggctgacaatctggaaacgatggacaaacgcttgacggcgaatgctgatacgtctgctcagctttcccgatctcgcaatatcatgcaggcaaccgtgaccaatggtttgcttctcaagcagatccatgacgcaatgattcaaaatgtacaggcgacaagcctattaacgatgactaccgcgcaggccggccttcacgaggcggaagaggcggccgctcaacgcaaggagcatcaaaagaccgctgtcatctttggtgccctcccctaaggctgggcgatttgttcatccgcccgcatcctcgccgaatgcgagctcattttatccaacattatgcgacaaaccagtcaagttcaggtccaatcgatgaatttcacgattccggcgccgtttacggccattcatacgatcttcgatgtagccttcacgacaggcttggactcgatgcttgagactatccaggaggcggtgagtgcgccattgatcgcctgtgtcactctttggattattgttcagggtattttagtcatacgcggcgaagtcgatacccgtagcggtatcactcgggtgatcacggtcaccatcgttgttgctctaattgttgggcaggctaactaccaagactatgtggtttccatcttcgaaaagacggtcccaaactttgttcagcagtttagtgtaaccggcttgcctctgcagactgttccggcacagttggatacaatgttcgccgtgacccaggccgtttttcagaaaatcgcatccgaaatcggtccgatgaacgaccaggacatccttgctttccaaggggcacagtgggtcctttacggcacgctctggtctgccttcggagtttacgacgccgttggaattctcacgaaagtgcttctcgcgatcgggcctctgatcctcgtcggatatatttttgatcgcacgcgggacatcgcagctaagtggatcgggcaacttatcacctacggtctcttgcttctcctcttaaacctcgtggcaacgatcgtcatcctaaccgaagcgactgcgctcacccttatgcttggtgtaatcaccttcgccggtacgaccgcggccaagatcattggtctttacgaactcgatatgttttttctgacaggggatgcgctcattgtcgctttgccggcgatcgccggcaacattggaggcagttactggagcggcgcaacccaatctgccagcagcttgtaccgtcgcttcgctcaggttgagcgaggctaggtcgcgcaaaaattcgcctcaatggagaattctatgaagtattgcctgctgtgcctagttgtcgctttgagcggctgccagacaaacgacacattagcgagctgcaaaggcccgatcttcccgctgaatgtggggcgatggcagcctactccgtcagatcttcagctcggcaattcgggtggacgctatgacggggcctgaatatgccatgctagtggcgcgcgaaagccttgccgagcactataaggaagtagaagcctttcaaaccgcgcgagcgaaatcggcgcgacgtctctccaaactcattgcagctgtcgcagctatcgcgattttgggaaatgttgctcaagcgttcgctatagccacaatggtgccgttgagcaggcttgtgcccgtatatctatggatacggccggacggcaccgttgacagcgaggtgtctgtctcgcgattgcctgcaactcaagaggaggccgtcgttaacgcctcattgtgggagtacgttcgcctgcgcgagagttatgatgccgacaccgctcagtacgcctacgacctggtatcgaacttcagtgccccaacagtgcgccaggattaccagcaattcttcaactatcccaatcccagttcgcctcaagtcattcttggcaaacgcggcagggtggaggtcgagcacatcgcttcaaatgatgtaactccaagcacgcagcaaattcgctataaaaggaccctcgtcgttgacggcaaaatgcctgtggtgagtacgtggaccgcgacagttcgctacgaaaaggtgaccagcttgcccggcagattgagactaaccaacccggcaggtctggttgtcacctcctatcagacatcggaagataccgtttcaaacgtaggccacagcgaaccatgatcagaaaagcacttttcattttagcatgtttatttgccgctgcgactggtgcggaggctgaagacactccaatggcgggcaagctagatccgcgcatgcgttatttggcttacaatcccgatcaagtggtgcgcctctcgacggcggttggagctactttggtcgtaacattcgccacgaacgaaacggtgacagcggttgccgtttcaaatagcaaagatctagcagccctaccgcggggaaattatctatttttcaaggcaagccaggtcctcacgcctcagccagtaatcgtgctaaccgcaagcgactccgggatgcgccgttatgttttcagtataagttccaagactctgtcccacctcgataaagagcagcccgatctctattacagcgtccaattcgcctaccccgccgacgatgcggcggctcggcgaagggaggcacaacagaaggctgttgtggacagactacacgcggaagcacaatatcaacggaaagctgagaatttattggatcagcctgtcacagcccttggtgcggcggacagtaattggcactacgtcgcccaaggcgatcgttcgctgttgccactcgaagtcttcgacaatggatttacgacggtattccactttccgggcaatgtacgcataccctccatctacaccatcaatcctgatggcaaggaagctgttgccaactattcagttaaagggagcgatgtcgagatttcttcggtttcccgaggttggcgtctgagggatggccacacagtactatgtatctggaacaccgcttacgatcccgttggccaaaggccgcaaacgggcacggtgaggcccgatgtgaaacgcgtcctgaagggggcgaagggatgaataacgatagtcagcaagcggcacatgaggttgatgcatctggatccctggtctccgacaaacatcgccggcgtctttcggggtctcagaaattgatcgtcggaggtgtcgttctcgcgttatcattaagcctcatttggctaggtgggcgccaaaagaaggtgaatgagaacgcatcgccgtcaactttgatcgcaacaaacaccaagccatttcatccagctccgattgaggtgccgccggatcctccagcggttcaagaggctgttcagcctgctgctcctctaccgccgaggggcgaaccggagcggcatgagccacggccggaagaaacaccgatttttgcatatagcagcggcgatcaaggggtcagcaaacgcgccattcagggcgacacgggccgaagacaagaaggcaagcgtgacgacaactccttgccgaatggcgaagtgtccggcgagaacgatttgtcgatacgtatgaaacccaccgagctgcagcccagcagcgccacgctcttgccgcaccccgattttatggtaacgcaagggacaataattccgtgcatcttgcaaaccgcaatcgacacaaatttggcaggctatgtaaagtgtgtcttgcctcaggatattcgtggaacaacgaacaatatcgtgcttcttgatcgtggcaccaccgttgttggcgaaatacagcgtggcttgcaacagggagatgggcgcgtttttgtgttgtgggatcgcgccgagacacctgaccatgcgatgatctcgttaacatcgccaagcgcggacgaactcggtcgctcaggattgccgggctcggtcgacagccacttctggcagcgttttagcggagctatgctcttgagtgttgttcaaggcgccttccaggcagctagcacctacgccggcagctcgggtggcgggatgagcttcaacagctttcaaaataacggtgagcagacaactgagacagcccttaaggcaaccatcaacataccgccaaccctgaagaagaatcagggtgacaccgtttccattttcgtagcacgggacctcgatttctttggtgtttaccagctccgcctgactggcggcgccacgcgggggaggaaccgccgctcttaatgaattcaaatttccgcttagagataggatacattgtaaatggaagtggatccgcaactacgctttcttctgaagccgattttggaatggctcgatgacccgaagactgaagaaattgcgatcaatcgacctggagaggcatttgtgcgccaagccggcatttttaccaagatgcctttgcccgtctcttatgatgatcttgaagatatcgctattttagcgggcgcgctgagaaagcaggatgtcggaccacgtaaccccctctgcgccactgaacttcctggtggtgaacgactacaaatctgtctgccgccgaccgttccctcgggcaccgtcagcttgaccattcgacggccaagctcgcgtgtttctggtcttaaagaagtctcctcccgttatgatgcttcgaggtggaaccagtggcagacacgaaggaaacgccaaaatcaggatgatgaagctatccttcagcattttgacaacggggatttggaagcgtttctgcacgcatgcgtcgtcagccgactgacgatgttgctatgtggccctaccggaagcggcaagacaacaatgagcaagaccttgatcagcgccatccccccccaggaaaggctaatcaccatagaagatacgctcgaactcgtcattccacacgataatcatgttagactactctactccaagaacggtgctgggctgggtgctgtgagcgccgagcacttgctccaagcaagtctgcgtatgcggccggaccggatattgcttggcgagatgcgcgacgatgcagcatgggcttatctgagtgaagtcgtctcgggacatccgggatcgatttcaacaatacacggcgcgaatccaatccaaggattcaagaaactgttttcccttgtcaaaagtagcgcccaaggtgctagcttggaagatcgcacactgattgacatgctctctacggcgatcgatgtcatcattccattccgtgcctatgaggacgtttatgaagtaggcgagatctggctcgcggcggacgcacgacgccggggcgagaccataggcgatctccttaatcaatagtagctgtaacctcgaagcgtttcacttgtaacaacgattgagaacttttgtcataaaattgaaatacttggttcgcattttcgtcatccgcggtcagccgcaattctgacgaactgcccatttagctggagatgattgtacatccttcacgtgaaaatttctcaagcgctgtgaacaagggttcagattttagattgagaggtgagccgttgaaacacgttcttcttatcgatgacgatgtcgctatgcggcatcttattatcgaataccttacgatccacgccttcaaagtgaccgcggtagccgacagcacccagttcactagagtactctcttccgcgacggtcgatgtcgtggttgttgatctaaatttaggtcgtgaagatgggcttgagatcgttcgaaatctggcggcaaagtctgatattccaatcataattatcagtggcgaccgccttgaggagacggataaagttgttgcactcgagctaggagcaagtgattttatcgctaagccgtttagtacgagagagtttcttgcacgcattcgggttgccttgcgcgtgcgccccaacgttgtccgctccaaagaccgacggtctttttgttttactgactggacacttaatctcaggcaacgtcgcttgatgtccgaagctggcggtgaggtgaaacttacggcaggtgagttcaatcttctcctcgcgtttttagagaaaccccgcgacgttctatcgcgcgagcaacttctcattgccagtcgagtacgcgacgaggaggtttacgacaggagtatagatgttctcattttgcggctgcgccgcaaacttgaggcggatccgtcaagccctcaactgataaaaacagcaagaggtgccggttatttctttgacgcggacgtgcaggtttcgcacggggggacgatggcagcctgagccaattgcatttgattaatttaggtgactgaggacgcggccagcggcctcaaacctacactcaatatttggtgaggggttccgataggtccctcttcaccaattgctcgatggcttctctccagcaaagaatgacgcgagcgcggcggtagccagcttgtggccgaaagctcgagcggtctccaaccccaacggatcaaaatgacttcgagcgacctcgagcaacgcaaccgggaacatgcgtgaggtctgaacgagaacggatttttctgtagttgaagggatcggataacttttcggggccacgcgaaatgatccatctgccagcatgctttcgaaatcgtccaacgcgcgccttaaaatcatttgtagcgacttcgagggactgtattgccgaacgaggttgtcatatgttttcgacacttgaggcgcgggcggtcgcgctgaaagaaaaacctggagctttttcggggacggaggtggactaagggcatccacagttagcttaagttgtcgatcgggactgtaaatgtgatcggcgacgagaggctcacgttgctggtctttctcgtcggctttttcaggcaagtgctggaggtccagcttctggggaacaagtgtcgggttgggatggtggatctcgggtcgagcaccagcaagccgccgtgcttcgccgaccgacaatgcgggcttgcgaattgccatcttcaagcctccaagattttgctgatcagtttcgaaatgaccacgacttcctccatcgcaatccgaagattcctctctatgaggcgcatcgtcggatcagttcccgtgtttagtaatgtaagatgcaacatgccgcgttctttcatcgcggcaaatgcatctctttcatgcatgggagacggtacaactggaaggctctctagcgtctctgacatcctgcgttgcgatgttgtcaatcggccgaccgggacgcgttggcgcaaaacagctgtaggaattgccaaattttcactcaacagcagctcgatgacgtagcggtaggtagatagtgcctcatcgatgtcgagcggcgttagcatggtggggatcagaagcaggtttgagctagcgatgattgtgttgttgagctcgctcgagccgccacgcgtatcggccaacgcataatcaaatccttcgagctcggcattttcataggctgcttcaagaaggggcatttcgtcggcggaatagacttcacagcgaggatcccaggtactgctttgtaaggcgttttctctccatcgcgtcagaggccggttttcgtcggcatcaaagagggccactcgtttaccgtcatttgccaaagcagcgcaaaggcccatgagtgcggtggttttgccagcaccccctttgaaagaacaaaacgtcaaaagttgcatattctgatcccgcctatcctgtgaaaccggagtgcatttgtatttttgttcgtataaatgtttttgtgattatcgatgagtaaaagcgttgttacactatttttatttcacattcgttataagacaattgcaaatgtagcaagtatattcagtattgactgtaaatgtactgttgatttcatattgagcagggctagacttccatccgtctacccgggcacatttcgtgctggagtatccagaccttccgctttctttggaggaagctatgtcaaaacacaccagagccacgtcgagtgagactaccatcaaccagcatcgatccctgaaagttgaagggttcaaggtcgtgagtgcccgtctgcgatcggccgagtatgaaaccttttcctatcaagcgcgcctgctgggactttcggatagtatggcaattcgcgttgcggtgcgccgcatcgggggctttctcgaaatagatgcagacacacgagaaaagatggaagccatacttcagtccatcggaatactctcaagcaatgtatccatgcttctatctgcctacgccgaagaccctcgatcggatctggaggctgtgcgagatgaacgtattgcttttggcgaggctttcgccgccctcgatggactactgcgctccattttgtccgtatcccggcgacggatcgacggtcgctcgttactgaaaggtgccttgtagcacttgaccacgcacctgacgggagaaaattggatgcccgatcgcgctcaagtaatcattcgcattgtgccaggaggtggaaccaagacccttcagcagataatcaatcagctggagtacctgtcccgaaagggaaagctggaactgcagcgttcagcccggcatctcgatattcccgttccgccggatcaaatccgtgagcttgcccaaagctgggttacggaggccgggatttatgacgaaagtcagtcagacgatgacaggcaacaagacttaacaacacacattattgtaagcttccccgcaggtaccgaccaaaccgcagcttatgaagcaagccgggaatgggcagccgagatgtttgggtcaggatacgggggtggccgctataactatctgacagcctaccacgtcgaccgcgatcatccacatttacatgtcgtggtcaatcgtcgggaacttctggggcaggggtggctgaaaatatccaggcgccatccccagctgaattatgacggcttacggaaaaagatggcagagatttcacttcgtcacggcatagtcctggatgcgacttcgcgagcagaaaggggaatagcagagcgaccaatcacatatgctgaatatcgacgccttgagcggatgcaggctcaaaagattcaattcgaagatacagattttgatgagacctcgcctgaggaagatcgtcgggacctcagtcaatcgttcgatccatttcgatcggacgcatctgccggcgaaccggaccgtgcaacccgacatgacaaacaaccgcttgaaccgcacgcccgtttccaggagcccgccggctccagcatcaaagccgacgcacggatccgcgtaccattggagagcgagcggggtgcccaaccatccgcgtccaaaatccctgtaactgggcatttcgggattgagacttcgtatgtcgctgaagccagcgtgcccaaacaaagcggcaattccgatacttctcgcccggtgactgacgttgccatgcacacagtcgagcgccagcagcgatcaaaacgacgtcatgacgaggaggcaggtccgagcggagcaaaccgtaaaagattgaaggccgcgcaagttgattccgaggcaaatgtcggtgagcccgacggtcgcgatgacagcaacaaggcggctgatccggtgtctgcttccatccgtaccgagcaaccggaagcttctccaacgtgtccgcgtgaccgtcacgatggagaattgggagaacgcaaacgtgcaagaggtaatcgtcgcgacgatgggcgcggggggacctagactagtgtacctcgcgaatgcatctagatccaatccaatat

SEQ ID NO: 44 - DNA, 31939 bp, Artificial Sequence
  Synthetic construct containing Agrobacterium tumefaciens VIR genes
cgccaacacccgctgacgcgccctgacgggcttgtctgctcccggcatccgcttacagacaagctgtgaccgtctccgggagctgcatgtgtcagaggttttcaccgtcatcaccgaaacgcgcgaggcagcagatctatcgatggtacctatctgcagacggaagggattcctgttaattaaaacagcttgcgtcatgcggtcgctgcgtatatgatgcgatgagtaaataaacaaatacgcaaggggaacgcatgaaggttatcgctgtacttaaccagaaaggcgggtcaggcaagacgaccatcgcaacccatctagcccgcgccctgcaactcgccggggccgatgttctgttagtcgattccgatccccagggcagtgcccgcgattgggcggccgtgcgggaagatcaaccgctaaccgttgtcggcatcgaccgcccgacgattgaccgcgacgtgaaggccatcggccggcgcgacttcgtagtgatcgacggagcgccccaggcggcggacttggctgtgtccgcgatcaaggcagccgacttcgtgctgattccggtgcagccaagcccttacgacatatgggccaccgccgacctggtggagctggttaagcagcgcattgaggtcacggatggaaggctacaagcggcctttgtcgtgtcgcgggcgatcaaaggcacgcgcatcggcggtgaggttgccgaggcgctggccgggtacgagctgcccattcttgagtcccgtatcacgcagcgcgtgagctacccaggcactgccgccgccggcacaaccgttcttgaatcagaacccgagggcgacgctgcccgcgaggtccaggcgctggccgctgaaattaaatcaaaactcatttgagttaatgaggtaaagagaaaatgagcaaaagcacaaacacgctaagtgccggccgtccgagcgcacgcagcagcaaggctgcaacgttggccagcctcgcagacacgccagccatgaagcgggtcaactttcagttgccggcggaggatcacaccaagctgaagatgtacgcggtacgccaaggcaagaccattaccgagctgctatctgaatacatcgcgcagctaccagagtaaatgagcaaatgaataaatgagtagatgaattttagcggctaaaggaggcggcatggaaaatcaagaacaaccaggcaccgacgccgtggaatgccccatgtgtggaggaacgggcggttggccaggcgtaagcggctgggttgcctgccggccctgcaatggcactggaacccccaagcccgaggaatcggcgtgagcggtcgcaaaccatccggcccggtacaaatcggcgcggcgctgggtgatgacctggtggagaagttgaaggcagcgcaggccgcccagcggcaacgcatcgaggcagaagcacgccccggtgaatcgtggcaagcagccgctgatcgaatccgcaaagaatcccggcaaccgccggcagccggtgcgccgtcgattaggaagccgcccaagggcgacgagcaaccagattttttcgttccgatgctctatgacgtgggcacccgcgatagtcgcagcatcatggacgtggccgttttccgtctgtcgaagcgtgaccgacgagctggcgaggtgatccgctacgagcttccagacgggcacgtagaggtttccgcagggccggcaggcatggccagtgtgtgggattacgacctggtactgatggcggtttcccatctaaccgaatccatgaaccgataccgggaagggaagggagacaagcccggccgcgtgttccgtccacacgttgcggacgtactcaagttctgccggcgagccgatggcggaaagcagaaagacgacctggtagaaacctgcattcggttaaacaccacgcacgttgccatgcagcgtacgaagaaggccaagaacggccgcctggtgacggtatccgagggtgaagccttgattagccgctacaagatcgtaaagagcgaaaccgggcggccggagtacatcgagatcgagctagctgattggatgtaccgcgagatcacagaaggcaagaacccggacgtgctgacggttcaccccgattactttttgatcgatcccggcatcggccgttttctctaccgcctggcacgccgcgccgcaggcaaggcagaagccagatggttgttcaagacgatctacgaacgcagtggcagcgccggagagttcaagaagttctgtttcaccgtgcgcaagctgatcgggtcaaatgacctgccggagtacgatttgaaggaggaggcggggcaggctggcccgatcctagtcatgcgctaccgcaacctgatcgagggcgaagcatccgccggttcctaatgtacggagcagatgctagggcaaattgccctagcaggggaaaaaggtcgaaaaggtctctttcctgtggatagcacgtacattgggaacccaaagccgtacattgggaaccggaacccgtacattgggaacccaaagccgtacattgggaaccggtcacacatgtaagtgactgatataaaagagaaaaaaggcgatttttccgcctaaaactctttaaaacttattaaaactcttaaaacccgcctggcctgtgcataactgtctggccagcgcacagccgaagagctgcaaaaagcgcctacccttcggtcgctgcgctccctacgccccgccgcttcgcgtcggcctatgcatataattgtggtttcaaaatcggctccgtcgatactatgttatacgccaactctgaaaacaactttgaaaaagctgttttctggtatttaaatcctaggaaatatcagccgcttgtgtgttcaattcttctctgtttcacttgaaacaaattgaatagatattcccgctttcaaagccatttacaaatcctctcgtgcagcctaacgccattggcgtggaacaagcgttggcacgaggaagtaagtgcgatgaacggaaggtattcaccgacgcggcaggattttaagacaggcgcgaagccttggtctatattagcccttatcgttgccgcaatgattttcgcgttcatggcggttgcgtcctggcaggacaatgggactacccaggcaatccttagccaaatacgatcgattaacgctgacagcgcctcactgcagcgcgatgtactccgcgctcacacgggcaccgtggcgaactaccgccccattatctccaggctgggagctctgcggaagaatctggaagatttgaagcaattatttaggcaatctcatattgtaagtgagagcaatgctgctcaactgctacgccggctagaagtgtctctaaattcggctgacgcggcggtcgccgcctttggtgcgcaaaatgtccgcctgcaagattcgctggccagtttcactcgtgctttaagcaatcttccaggaaaggcctcaggcgatcagactttagaaaaaccaacagaattggctagcatgatgctccaatttcttcggcaaccaagcccggctatttcattcgagatcagccttgaactagagaggctccaaaaacaacgcggtcttgatgaagctcccgtgcgcatactttcgcgtgaaggtcccattatcttatcgcttttgccacaggtgaacgatctggtgaacatgattcagacgtctgacaccgcagaaattgcggaaatgttgcagcgtgagtgtttggaggtctatagcttgaaaaatgtggaggagcggagcgcacgtatctttcttgggtccgcttcagtgggtctttgcctgtacatcatcaccttagtctataggctacgcaaaaaaaccgattggttagcgcggcgtttagattacgaagagctaatcaaagagatcggagtatgttttgaaggtgaggcggccactacgtcgtccgcgcaagctgcacttggtattattcagcgcttctttgatgccgatacgtgcgcgttagctctagtggaccatgaccgtaggtgggctgtcgaaacattcggtgcgaagcacccaaaacccgtgtgggacgacagggtgctacgcgaaatagtctctcgtaccaaagcgaacgaacgggcgacggtattccgcatcgtatcgacgcaaaaaatcgtacatttgcctcccgaaattccaggtctttcgatactactggctcacaaatccacagataaactaattgcggtttgttcactgggttaccaaagctatcgccctcgaccttgccaaggcgaaattcagcttcttgaactcgccaccgcctgcctctgtcactatatcgatgttcggcgtaagcagaccgaatgcgacgttttggccagacgattggagcatgcgcaacgccttgaggcagttggtacacttgccggcggaatagcacatgaatttaataacattttggggtcaatcctcgggcacgcagaattggcccaaaactcggtgtctcgaacatctgtcacccgaagatacattgactatatcatttcgtcaggcgacagagccatgctcattatcgatcagatcttgacgctgagccgaaaacaagagcgcgtgatcaagccatttagtgtctcagagcttgtgaccgaaatcgctcccttgctacgtatggctcttcccccaaccatcgagcttagtttcagatttgatcaaatgcagagcgtgatcgaaggaagcccgcttgaacttcaacaggtactaattaacctctgcaagaatgcttcccaagccatgactgcaaatggtcaaatcgacatcttcgtcggccaagcttatttaccagctaagaaaattctggcgcatggtgttatgccacctggcgactatgttctactatctgtcagcgacaatggtggaggcatttcagaggctgtgctaccctacatttttgaacccttctttacgacacgtgctcgcaacggtggaacgggtctcggcctcgcttctgtgcatggtcatatcagcgcgtttgcaggttacatcgacgttagttcaactgttgggcatgggacgcgctttgacatttatctccctccgtcttctaaggagcccgtcaatcccgacagctttttcggccgcaataaggcaccgcgtggaaacggggagattgtggcacttgttgagcccgatgacctcctgcgggaggcgtatgaagacaagatcgccgctctgggatatgagccggtcggttttcgtacctttagtgaaattcgcgattggatttcaaaaggcaatgaagccgatctggtcatggtcgaccaagcgtctcttcctgaagatcaaagtcctaattccgtggatttagtgctcaagaccgcctccatcatcattggcggaaatgatctcaaaatgcccctttcaagggagaatgcgaccagggacctttatctgccgaagccgatatcgtccagaactatggcgcatgcaatcctaaccaaaatcaagacgtagagttgcgacgtatcaggactgggcaatcgcggccgccgggcttacgtgtcttttgtaacaaattgcgacgcagttgatatccacttgaaacattagtccgaaattatcgagatctccgctgataaggtatcgaaatggcgataaaattggtattgatactcgtattcacactctttcccgcggcagacgctgcatatgcgaatgaccgcgccaacggtttcatgtggtcaaacgggggcgaaactggagtgaggcttcctcttcgggtgttcaatgccaagccagccaagaacacggtggcgatcatttattccggagacgctggatggcaaaatatcgatgaggcgattggtacctatctgcagacggaagggattcctgtcattggcgtcagttcacttcggtatttctggtcggagcggtccccaagcgaaactgctaaggatcttggtcacataatcgatgtctacaccaagcatttcggtgtgcagaatgttttacttgtaggatattctttcggcgcggacgtcatgccggcaagcttcaataggcttacgcttgagcaaaaaaatcgggttaagcaaatctctctcttggcattgtcacatcaagtcgactatgtcgtctcatttaggggctggctccaactcgaaacggaaggtaagggcggcaatcctctggatgatctcagatccattgaccctgcaatcgtccaatgcatgtacgggcgcgaagaccgtaataatgcttgcccatctctccgacagaccggcgcagaggtgataggcttcagcggaggccatcactttgataatgatttcaaaaaactgtctacgcgcgtcgtctcaggcctcgtggcacgcctaagtcatcagtaatctttagttcctgcaccgcgggacccgcgaggtttctcgcttcaattgaaatcataaagaagcaattgaaaattttcgagtaaccgaccctcccgataatcttcaacataaaacaacgcacttcttccaacgggagaggcggtgttagttgcgagctaaggagataaggtatgcttaagagatcggggtcgctttctcttgccttgatggtctccttctgttcgtcgagccttgccacgccactctcatctgctgagtttgaccatgttgctcgcaagtgtgccccatcagttgcgacatctacgcttgcggcgatagctaaggtggagagtcgctttgatcctttagcgattcatgacaacacgaccggcgaaacgcttcactggcaagatcacagccaagcaacccaagtcgtcaggcaccgtctcgatgcacggcattcgctggatgttggcctcatgcaaataaactctcgaaatttttctatgctcggtctgacacctgacggtgcgctccaggcgtgcacatcattatctgccgctgcaaacatgctgaaaagtcgttatgcaggcggcgaaacgattgacgagaagcaatttgcgcttcgtcgggcgatctccgcttacaacaccggtaatttcatcggcggttttgcaaacggctacgtgcgaaaagttgaaacagctgctcaatcgctggtgcccgcgttaatcgagcctccaaaagacgatcacgaggcgctaaaatccgaagagacgtgggatgtttgggggtcatatcagcgccgctcgcaggaggatggcgctggcggtttaatcgctccgccaccgccacaccaggacaacggcaaatccgcagacgacaatcaagtcttattcgacttatactaaggaggtgcgcattgatgcgatgctttgagagataccgtttacatctaaatcgcctctcgctctcgaatgcgatgatgcgcgtgatatcgagctgcgccccaagcttgtgcggtgcaattgcatggagcatttcctcatccggacccgccgcagcgcaatctgcgggtggcggcactgaccccgccacaatggttaacaatatatgcacgtttatccttggtccgttcggccagtcactcgctgttctcggcattgtcgctatcgggatctcctggatgttcgggcgggcttcgcttgggctggttgccggcgtcgtcggcggcattgttatcatgtttggggcgagcttcctcggccaaacgctcactggcggtagttgatggctgatcgtttggaagaatcgaccctttacctcgcagccacacggcccgcattgtttcttggggtgccactgacattggcagggttattcatgatgttcgccggctttgtcatcgttatcgttcagaacccgctctacgaagtcgttctcgtgccgttatggtttgcagcccggctcatcgtggagcgagactacaatgcggcgagcgtcgtcctgctatttttgcggaccgcgggaagaagcattgatagtgcagtttgggggggcgctactgttagcccaaatccaattagggttcccccacgagggagaggaatggtgtgatgctcggcgcgagtggaacgaccgaaagatccggtgagatctatctcccttatattggccacctcagcgaccatatcgtccttcttgaagacggatcgatcatgaccattgcgagaattgatggcgttgcattcgagcttgaggaaactgaaatgcgcaatgcgcgttgtcgtgcgttcaacacgctgttgcgcaatatcgctgatgatcatgtgtcaatatatgctcacctcgtacgtcatgccgacgtgccatcatcggcgccgcgacacttccgtagtgttttcgccgctagcctgaacgaagcttttgaacagcgcgtgctctccggccaactcctccgcaatgaacacttccttacgttgattgtctacccacaggcggctttagggaaggtaaagaggaggttcaccaagctaagcggaaaaagggaaaacgatctcacgggccagatcaggaacatggaagatctttggcatgttgtcgctggctctcttaaagcgtatggcctgcatcgtcttggcatccgcgagaagcagggtgtgctcttcaccgaaattggcgaagcgctacggttgatcatgactggtcggttcacaccggttccggtcgtcagcggctcactcggcgcttcgatttataccgacagagtcatttgcggcaagcgaggactcgagatcagaacgccaaaagacagttacgttggatccatctattcgtttcgcgaataccctgcaaaaacacggccgggcatgctcaacgcgctgctatccctcgattttccacttgttctcacgcagagtttttcgttcctgactcgcccgcaagcgcacgcgaaacttagcctcaaatcgagccagatgctgagttccggcgataaagccgtgactcaaatcggcaaattatccgaggctgaggacgcacttgcgagcaacgaattcgttatgggctcacatcatttgagcctttgcgtctatgcagacgatctcaatagtcttggggacaggggcgcgcgggctcggacacgaatggcggatgcaggtgccgtggttgtccaagaaggtattggtatggaagcggcctattggtcccaattgccggggaattttaagtggcgcacacgccctggcgcaatcacttcacgcaatttcgcagggtttgtctctttcgaaaactttccagagggcgccagctcaggccactggggcaacgcgattgcccgatttcgtaccaatggcggaacgcctttcgactatatcccgcatgagcacgatgttggcatgacggcaatattcgggcctatcgggaggggtaagacgacgctcatgatgtttgttctagccatgctcgaacagagcatggtcgaccgtgcaggtacggtcgtgttctttgacaaggaccggggtggcgaattgctggttcgcgccacaggaggaacatatttggcacttcacagaggcacacccagcgggttggcgccgttgcgtggcctagaaaacacagcagcctcacacgattttctgcgcgaatggatcgtggctctcatcgagagtgatggtcggggtgggatttctccggaagagaaccgccgtctggtccgtggtatccatcgtcagctctcgtttgatccacaaatgcgttcaatcgcggggttacgtgaatttttgttgcatgggcccgccgaaggcgcaggagcgcggctccaacgctggtgccggggccatgcgcttggctgggcatttgacggcgaagttgacgaagtaaagttagatccgtcgattaccggcttcgacatgacgcatcttctcgaatacgaggaagtatgcgctcccgctgcagcatatctcctgcatcggattggagccatgatcgacggccgccgttttgtgatgagctgcgatgagtttcgcgcctatttgttaaaccctaaattttcgactgtcgtcgacaaattcctcctgaccgttcgaaaaaacaacgggatgctaatactggcaacgcagcaaccagagcatgttctggaatcgccgctaggagccagcttggttgcgcaatgtatgacgaagattttctatccatcaccaaccgcagatcgatcggcttatgtcgatggactgaaatgtaccgaaaaggaatttcaggcgatccgtgaagacatgacggtcggcagccgtaagtttcttcttaaacgagaaagtggaagcgtcatctgcgaatttgatctgcgggatatgcgtgaatatgtcgccgtgctttcggggcgtgccaacacggtgcgctttgcaactcgactacgcgaggcacaagaaggcaactcatctggctggctcagcgaattcatggcccgtcaccacgaggcagaagattgataaggtaggaaacgatgaagacgacgcaacttattgcaacagttttgacctgcagctttctatatattcagcccgcgcgggcgcagtttgttgttagcgacccggcaacggaggctgagacgctcgcgactgcgctcgcgactgcggagaatctcactcagactatagcgatggttacgatgttgacgtcggcctacggcgttactggactactgacttcgctcaaccagaaaaatcagtatccttcgacgaaggacctagacaatgaaatgttttcgccgcgaatgccaatgtcgaccacggcacgtgcgatcaccagcgatacagatcgtgcagtcgtgggtagtgatgctgaagcggacctgttgcgatcgcagatcaccggttccgcaaacagcgctggcattgcggctgacaatctggaaacgatggacaaacgcttgacggcgaatgctgatacgtctgctcagctttcccgatctcgcaatatcatgcaggcaaccgtgaccaatggtttgcttctcaagcagatccatgacgcaatgattcaaaatgtacaggcgacaagcctattaacgatgactaccgcgcaggccggccttcacgaggcggaagaggcggccgctcaacgcaaggagcatcaaaagaccgctgtcatctttggtgccctcccctaaggctgggcgatttgttcatccgcccgcatcctcgccgaatgcgagctcattttatccaacattatgcgacaaaccagtcaagttcaggtccaatcgatgaatttcacgattccggcgccgtttacggccattcatacgatcttcgatgtagccttcacgacaggcttggactcgatgcttgagactatccaggaggcggtgagtgcgccattgatcgcctgtgtcactctttggattattgttcagggtattttagtcatacgcggcgaagtcgatacccgtagcggtatcactcgggtgatcacggtcaccatcgttgttgctctaattgttgggcaggctaactaccaagactatgtggtttccatcttcgaaaagacggtcccaaactttgttcagcagtttagtgtaaccggcttgcctctgcagactgttccggcacagttggatacaatgttcgccgtgacccaggccgtttttcagaaaatcgcatccgaaatcggtccgatgaacgaccaggacatccttgctttccaaggggcacagtgggtcctttacggcacgctctggtctgccttcggagtttacgacgccgttggaattctcacgaaagtgcttctcgcgatcgggcctctgatcctcgtcggatatatttttgatcgcacgcgggacatcgcagctaagtggatcgggcaacttatcacctacggtctcttgcttctcctcttaaacctcgtggcaacgatcgtcatcctaaccgaagcgactgcgctcacccttatgcttggtgtaatcaccttcgccggtacgaccgcggccaagatcattggtctttacgaactcgatatgttttttctgacaggggatgcgctcattgtcgctttgccggcgatcgccggcaacattggaggcagttactggagcggcgcaacccaatctgccagcagcttgtaccgtcgcttcgctcaggttgagcgaggctaggtcgcgcaaaaattcgcctcaatggagaattctatgaagtattgcctgctgtgcctagttgtcgctttgagcggctgccagacaaacgacacattagcgagctgcaaaggcccgatcttcccgctgaatgtggggcgatggcagcctactccgtcagatcttcagctcggcaattcgggtggacgctatgacggggcctgaatatgccatgctagtggcgcgcgaaagccttgccgagcactataaggaagtagaagcctttcaaaccgcgcgagcgaaatcggcgcgacgtctctccaaactcattgcagctgtcgcagctatcgcgattttgggaaatgttgctcaagcgttcgctatagccacaatggtgccgttgagcaggcttgtgcccgtatatctatggatacggccggacggcaccgttgacagcgaggtgtctgtctcgcgattgcctgcaactcaagaggaggccgtcgttaacgcctcattgtgggagtacgttcgcctgcgcgagagttatgatgccgacaccgctcagtacgcctacgacctggtatcgaacttcagtgccccaacagtgcgccaggattaccagcaattcttcaactatcccaatcccagttcgcctcaagtcattcttggcaaacgcggcagggtggaggtcgagcacatcgcttcaaatgatgtaactccaagcacgcagcaaattcgctataaaaggaccctcgtcgttgacggcaaaatgcctgtggtgagtacgtggaccgcgacagttcgctacgaaaaggtgaccagcttgcccggcagattgagactaaccaacccggcaggtctggttgtcacctcctatcagacatcggaagataccgtttcaaacgtaggccacagcgaaccatgatcagaaaagcacttttcattttagcatgtttatttgccgctgcgactggtgcggaggctgaagacactccaatggcgggcaagctagatccgcgcatgcgttatttggcttacaatcccgatcaagtggtgcgcctctcgacggcggttggagctactttggtcgtaacattcgccacgaacgaaacggtgacagcggttgccgtttcaaatagcaaagatctagcagccctaccgcggggaaattatctatttttcaaggcaagccaggtcctcacgcctcagccagtaatcgtgctaaccgcaagcgactccgggatgcgccgttatgttttcagtataagttccaagactctgtcccacctcgataaagagcagcccgatctctattacagcgtccaattcgcctaccccgccgacgatgcggcggctcggcgaagggaggcacaacagaaggctgttgtggacagactacacgcggaagcacaatatcaacggaaagctgagaatttattggatcagcctgtcacagcccttggtgcggcggacagtaattggcactacgtcgcccaaggcgatcgttcgctgttgccactcgaagtcttcgacaatggatttacgacggtattccactttccgggcaatgtacgcataccctccatctacaccatcaatcctgatggcaaggaagctgttgccaactattcagttaaagggagcgatgtcgagatttcttcggtttcccgaggttggcgtctgagggatggccacacagtactatgtatctggaacaccgcttacgatcccgttggccaaaggccgcaaacgggcacggtgaggcccgatgtgaaacgcgtcctgaagggggcgaagggatgaataacgatagtcagcaagcggcacatgaggttgatgcatctggatccctggtctccgacaaacatcgccggcgtctttcggggtctcagaaattgatcgtcggaggtgtcgttctcgcgttatcattaagcctcatttggctaggtgggcgccaaaagaaggtgaatgagaacgcatcgccgtcaactttgatcgcaacaaacaccaagccatttcatccagctccgattgaggtgccgccggatcctccagcggttcaagaggctgttcagcctgctgctcctctaccgccgaggggcgaaccggagcggcatgagccacggccggaagaaacaccgatttttgcatatagcagcggcgatcaaggggtcagcaaacgcgccattcagggcgacacgggccgaagacaagaaggcaagcgtgacgacaactccttgccgaatggcgaagtgtccggcgagaacgatttgtcgatacgtatgaaacccaccgagctgcagcccagcagcgccacgctcttgccgcaccccgattttatggtaacgcaagggacaataattccgtgcatcttgcaaaccgcaatcgacacaaatttggcaggctatgtaaagtgtgtcttgcctcaggatattcgtggaacaacgaacaatatcgtgcttcttgatcgtggcaccaccgttgttggcgaaatacagcgtggcttgcaacagggagatgggcgcgtttttgtgttgtgggatcgcgccgagacacctgaccatgcgatgatctcgttaacatcgccaagcgcggacgaactcggtcgctcaggattgccgggctcggtcgacagccacttctggcagcgttttagcggagctatgctcttgagtgttgttcaaggcgccttccaggcagctagcacctacgccggcagctcgggtggcgggatgagcttcaacagctttcaaaataacggtgagcagacaactgagacagcccttaaggcaaccatcaacataccgccaaccctgaagaagaatcagggtgacaccgtttccattttcgtagcacgggacctcgatttctttggtgtttaccagctccgcctgactggcggcgccacgcgggggaggaaccgccgctcttaatgaattcaaatttccgcttagagataggatacattgtaaatggaagtggatccgcaactacgctttcttctgaagccgattttggaatggctcgatgacccgaagactgaagaaattgcgatcaatcgacctggagaggcatttgtgcgccaagccggcatttttaccaagatgcctttgcccgtctcttatgatgatcttgaagatatcgctattttagcgggcgcgctgagaaagcaggatgtcggaccacgtaaccccctctgcgccactgaacttcctggtggtgaacgactacaaatctgtctgccgccgaccgttccctcgggcaccgtcagcttgaccattcgacggccaagctcgcgtgtttctggtcttaaagaagtctcctcccgttatgatgcttcgaggtggaaccagtggcagacacgaaggaaacgccaaaatcaggatgatgaagctatccttcagcattttgacaacggggatttggaagcgtttctgcacgcatgcgtcgtcagccgactgacgatgttgctatgtggccctaccggaagcggcaagacaacaatgagcaagaccttgatcagcgccatccccccccaggaaaggctaatcaccatagaagatacgctcgaactcgtcattccacacgataatcatgttagactactctactccaagaacggtgctgggctgggtgctgtgagcgccgagcacttgctccaagcaagtctgcgtatgcggccggaccggatattgcttggcgagatgcgcgacgatgcagcatgggcttatctgagtgaagtcgtctcgggacatccgggatcgatttcaacaatacacggcgcgaatccaatccaaggattcaagaaactgttttcccttgtcaaaagtagcgcccaaggtgctagcttggaagatcgcacactgattgacatgctctctacggcgatcgatgtcatcattccattccgtgcctatgaggacgtttatgaagtaggcgagatctggctcgcggcggacgcacgacgccggggcgagaccataggcgatctccttaatcaatagtagctgtaacctcgaagcgtttcacttgtaacaacgattgagaacttttgtcataaaattgaaatacttggttcgcattttcgtcatccgcggtcagccgcaattctgacgaactgcccatttagctggagatgattgtacatccttcacgtgaaaatttctcaagcgctgtgaacaagggttcagattttagattgagaggtgagccgttgaaacacgttcttcttatcgatgacgatgtcgctatgcggcatcttattatcgaataccttacgatccacgccttcaaagtgaccgcggtagccgacagcacccagttcactagagtactctcttccgcgacggtcgatgtcgtggttgttgatctaaatttaggtcgtgaagatgggcttgagatcgttcgaaatctggcggcaaagtctgatattccaatcataattatcagtggcgaccgccttgaggagacggataaagttgttgcactcgagctaggagcaagtgattttatcgctaagccgtttagtacgagagagtttcttgcacgcattcgggttgccttgcgcgtgcgccccaacgttgtccgctccaaagaccgacggtctttttgttttactgactggacacttaatctcaggcaacgtcgcttgatgtccgaagctggcggtgaggtgaaacttacggcaggtgagttcaatcttctcctcgcgtttttagagaaaccccgcgacgttctatcgcgcgagcaacttctcattgccagtcgagtacgcgacgaggaggtttacgacaggagtatagatgttctcattttgcggctgcgccgcaaacttgaggcggatccgtcaagccctcaactgataaaaacagcaagaggtgccggttatttctttgacgcggacgtgcaggtttcgcacggggggacgatggcagcctgagccaattgcatttgattaatttaggtgactgaggacgcggccagcggcctcaaacctacactcaatatttggtgaggggttccgataggtccctcttcaccaattgctcgatggcttctctccagcaaagaatgacgcgagcgcggcggtagccagcttgtggccgaaagctcgagcggtctccaaccccaacggatcaaaatgacttcgagcgacctcgagcaacgcaaccgggaacatgcgtgaggtctgaacgagaacggatttttctgtagttgaagggatcggataacttttcggggccacgcgaaatgatccatctgccagcatgctttcgaaatcgtccaacgcgcgccttaaaatcatttgtagcgacttcgagggactgtattgccgaacgaggttgtcatatgttttcgacacttgaggcgcgggcggtcgcgctgaaagaaaaacctggagctttttcggggacggaggtggactaagggcatccacagttagcttaagttgtcgatcgggactgtaaatgtgatcggcgacgagaggctcacgttgctggtctttctcgtcggctttttcaggcaagtgctggaggtccagcttctggggaacaagtgtcgggttgggatggtggatctcgggtcgagcaccagcaagccgccgtgcttcgccgaccgacaatgcgggcttgcgaattgccatcttcaagcctccaagattttgctgatcagtttcgaaatgaccacgacttcctccatcgcaatccgaagattcctctctatgaggcgcatcgtcggatcagttcccgtgtttagtaatgtaagatgcaacatgccgcgttctttcatcgcggcaaatgcatctctttcatgcatgggagacggtacaactggaaggctctctagcgtctctgacatcctgcgttgcgatgttgtcaatcggccgaccgggacgcgttggcgcaaaacagctgtaggaattgccaaattttcactcaacagcagctcgatgacgtagcggtaggtagatagtgcctcatcgatgtcgagcggcgttagcatggtggggatcagaagcaggtttgagctagcgatgattgtgttgttgagctcgctcgagccgccacgcgtatcggccaacgcataatcaaatccttcgagctcggcattttcataggctgcttcaagaaggggcatttcgtcggcggaatagacttcacagcgaggatcccaggtactgctttgtaaggcgttttctctccatcgcgtcagaggccggttttcgtcggcatcaaagagggccactcgtttaccgtcatttgccaaagcagcgcaaaggcccatgagtgcggtggttttgccagcaccccctttgaaagaacaaaacgtcaaaagttgcatattctgatcccgcctatcctgtgaaaccggagtgcatttgtatttttgttcgtataaatgtttttgtgattatcgatgagtaaaagcgttgttacactatttttatttcacattcgttataagacaattgcaaatgtagcaagtatattcagtattgactgtaaatgtactgttgatttcatattgagcagggctagacttccatccgtctacccgggcacatttcgtgctggagtatccagaccttccgctttctttggaggaagctatgtcaaaacacaccagagccacgtcgagtgagactaccatcaaccagcatcgatccctgaaagttgaagggttcaaggtcgtgagtgcccgtctgcgatcggccgagtatgaaaccttttcctatcaagcgcgcctgctgggactttcggatagtatggcaattcgcgttgcggtgcgccgcatcgggggctttctcgaaatagatgcagacacacgagaaaagatggaagccatacttcagtccatcggaatactctcaagcaatgtatccatgcttctatctgcctacgccgaagaccctcgatcggatctggaggctgtgcgagatgaacgtattgcttttggcgaggctttcgccgccctcgatggactactgcgctccattttgtccgtatcccggcgacggatcgacggtcgctcgttactgaaaggtgccttgtagcacttgaccacgcacctgacgggagaaaattggatgcccgatcgcgctcaagtaatcattcgcattgtgccaggaggtggaaccaagacccttcagcagataatcaatcagctggagtacctgtcccgaaagggaaagctggaactgcagcgttcagcccggcatctcgatattcccgttccgccggatcaaatccgtgagcttgcccaaagctgggttacggaggccgggatttatgacgaaagtcagtcagacgatgacaggcaacaagacttaacaacacacattattgtaagcttccccgcaggtaccgaccaaaccgcagcttatgaagcaagccgggaatgggcagccgagatgtttgggtcaggatacgggggtggccgctataactatctgacagcctaccacgtcgaccgcgatcatccacatttacatgtcgtggtcaatcgtcgggaacttctggggcaggggtggctgaaaatatccaggcgccatccccagctgaattatgacggcttacggaaaaagatggcagagatttcacttcgtcacggcatagtcctggatgcgacttcgcgagcagaaaggggaatagcagagcgaccaatcacatatgctgaatatcgacgccttgagcggatgcaggctcaaaagattcaattcgaagatacagattttgatgagacctcgcctgaggaagatcgtcgggacctcagtcaatcgttcgatccatttcgatcggacgcatctgccggcgaaccggaccgtgcaacccgacatgacaaacaaccgcttgaaccgcacgcccgtttccaggagcccgccggctccagcatcaaagccgacgcacggatccgcgtaccattggagagcgagcggggtgcccaaccatccgcgtccaaaatccctgtaactgggcatttcgggattgagacttcgtatgtcgctgaagccagcgtgcccaaacaaagcggcaattccgatacttctcgcccggtgactgacgttgccatgcacacagtcgagcgccagcagcgatcaaaacgacgtcatgacgaggaggcaggtccgagcggagcaaaccgtaaaagattgaaggccgcgcaagttgattccgaggcaaatgtcggtgagcccgacggtcgcgatgacagcaacaaggcggctgatccggtgtctgcttccatccgtaccgagcaaccggaagcttctccaacgtgtccgcgtgaccgtcacgatggagaattgggagaacgcaaacgtgcaagaggtaatcgtcgcgacgatgggcgcggggggacctagactagtagacaggaaggaccgaataatggcaaatggtcagttcacgatacgctctgctcgcccggcctccgtcggactgacaggcgaacggcgtggagccgcatccgcctctagctctgcactgtccaatgttcaaagagatgttagggataggctgattccaactagctcaccaagattaccaaatgcagccatattgcgtgattcctcgggaagagcgtcgactggtctgcggtacatggcggctactcttcattggtctgcgatcgcgccattatcgctaataaacagcaacgacctggctccggccgcttatgactttgagacgcgaaataacgcaagaaatgtgactgccaaagtcggcagggcagtccctgttcccaagcaaggcgggctcggcaaaacgctcgcacccgtaccccttagtacacgtatatcaagggtcaattccgaccgaagactgcccgctgacgcagaagaccgccctgaaacgcgcgacccccagaaaggacgtggcagtcatggtgcgacgccaaccttacatgaaaagattggaaccgcgtttgctcgaagattgcgaaagcatacgtactatattgtttgcagttgctgccagacccggagcgcgttgacgatgggtgcaaagatttcggtgaagtcatgaactccagcaagacttcgccccagcgtatgaccctgagcatcgtatgttcgctggcagccggtttttgtgcggccagctgctatgtaacgttccgccggggcttcaacggcgaagcgatgatgacgttcgacgttttcgctttttggtatgagaccccgctttacttgggttatgccagcaccgtcttctggcgtggtttatctgttgtcatctttacctcgctgatcgttctttcaagtcagctcatcatatcgctgcgcaatcagaagcatcatgggacagctcgttgggcagaaattggcgaaatgcggcatgctggttatctgcagcgttacagtcgcatcaaggggccgatctttggaaagacatgtggtcccctttggttcggcagttatttgaccaatggcgaacagccacacagtcttgtcgtcgcgccaacgcgtgctggcaaaggcgtcggcatcgtcattccaacgctgttgaccttcaagggctcggtaatcgcccttgacgtcaagggagaattgtttgaactgacgtccagagcacgcaaagcgagcggcgacgcagttttcaagttctcccccctagatcctgagcggaagactcattgttacaatccggtcctggatattgccgcacttccgcccgaacgccagttcactgaaacacgccgtctagctgcgaaccttattacggctaagggaaagggagcagaaggctttattgacggcgcacgtgacctgttcgtcgcgggaatccttacctgcattgagcgtggcacaccaacgattggcgcggtatatgacctatttgcgcagcctggcgaaaagtataagctttttgcgcaactcgcggaggaaagcctaaacaaagaggctcagcgtatcttcgataatatggcgggcaacgacacgaaaattctgacatcgtacacctctgtgctgggcgacggtggactgaacctgtgggctgatccgcttatcaaagcagcgacaagccggtcagacttttccgtttacgatctccggaggaagaagacctgcatttatctttgtgtcagtcccaacgatctggaggtcttggcaccacttatgcgcctgatgtttcagcagctcgtgtcaatcttgcagagatcgctgccaggtgaagacgagtgccatgaagttttatttctcctcgacgaattcaaacacctgggcaagcttgaggccatagagaccgcgatcacaaccatcgccggttacagaggccgctttatgtttattattcaaagtctttcggccttgtcgggcacatacgatgacgcaggaaaacaaaactttctgagcaatactggcgtacaagtatttatggccacggctgatgacgaaactccaacctacatctcaaaagctatcggcgaatatacgtttaaagcgcgttcgacctcttacagtcaagccagaatgttcgaccacaacatccagatttctgatcaaggtgcagcccttttgcgccccgaacaagtgcgcctgctagacgatcagagtgaaatcgttctcatcaaagggcgacctccactcaaattacgaaaggtgcagtattattccgatcgtacgctgaaaggccttttcgaacgccagatgggctctctgcctgagcccgcacccttgatgctttccgactatagcaacgatcaagttcaataccacttggctccgatagcaaattttaatgaggatgctgcaccgcaaaacagaactgtggccgaggaccatggaagtgttaaagtcggtgctgatatccctgaacgcgtgatgggaataaatggtgacgaggaacaagccgatgcgggcgagataccgccggaatcggttgtgcctccagaattgacgctcgctctgaccgctcaacagcaattgttggaccagattattgcacttcagcaaagatcgaggtccgcaccggcatagcctgcgaaatgatcttaatggtgcaattcgtttcaggcggcatgttgcggttcaacaaagtgtacgccagatcccaattggccctttacgaggtgtcggtatgacaggaaagtcgaaagttcacataagaggttcggctgacgcgcttcctgacgttcctggcggaagtactaccgccccttttttaaccgaaccttctcgggatcaggttgatgcctcgtttgaggtccaaaccgactacagccagtctacttccgtgtcgtttacctatgatggtgttggacttggtcctgccgagcgtgcggcttacgagaactggtgcgaaccgggccggcccacttggaaagatcttataatcaaggcacgtgtcgatccgattgacgatgtgacctggctccgagatttagaagaggacaccccctcaaccttcagatacgaagggatgcctctgggcatcggggaacgacaggcctacgaaaattggcaagaggacgctcagccgacatgggaagaccttgttgtcagcgcacgcttgacggaacttggccgtccacacgggattaccggcgagtatacatccctcgcaggatcgaagaatacaagttcaatttcattgaagcgaaagcggagcaacttaattgatgatgagaattcatccggatcgttttcatatgacgggatgaagctcggggaagccgagcgttctgcatatggtgactgggccgaggcggagccacccacgtggaaagatttggtattgagggcacgcgtttcctcgatcaatgactctgcttggctttttgattcacaaacatcttcatcatcatttgaatacaacggtgttcccttgggcgagccggaacggcaggctctcagacaatggcaaggagacgctcagcctacctgggaagatctcgttgttaacgcgcgtatggcagaactttgccatgctggttggattgaaggtcaaaaaggttgctttgaagagcgcggggaggctctgcccgcgtcggaacgcggttcgcaacgccccattggtcaacggacagattcctccgattcttttgtgtatgatggcacaaggctcggagcacctgagcgaactgcttatgaacgctggagtaagagggaacgcccgacttgggaagatctcatcttagatgcacaccaggccaggactgaaagtgacgctgttacgacccaagcgattggtcagtcgtcctcaccggttttcttatatgaaggaaagtcgctcggagacagggaacgaaaggcttacgaaaaatggcggcagccagcccaaccgcgatggcaaaatcttgtagtgaacgctcgtctggcagaaatcgatccctcagcctggattgccgatgagcgcgatccgcttgatgatagcgacgcgcttggtcgcccgtcgtacacaagcttgacggatagatcagacgtccctttagacgatcaatcaatctatcgtcgttccgacctagtaagggagcaggtgccagaatcgtctcaaaggcaattcgcagcatgttcagaatctgaaacgaggcctgtgcaatggtttactgcttctgggtcagatgcaaacaatacggaaaatatcaccgccagcgatcccgtcgatcgcacgggtggagttaagcggctaggctccaaaagcgacagaaccgttacagcttctatccatgacgtgaattccagcacaaggcgactgttgcttaacgaatttggatcggaggctccgcgcccttcgccagaaaagactgttcgcttaagaagcgacaatattggcacctatgggagccggaaaaatgaacgagcgcggctcgcgaccgaaaccggtgcgtatgagtcggagcatattttcgggttcaaggctgtccacgatactgcgagagcgacgaaagagggccggcgtctcgaaaggcccatgcccgcctaccttgaggataaggggcttcatcgccaacatattggcaccgggagaggacggaccaaacttgtcgggcgcggatggccggatgacacaagctatcgctcggatcaaagggcaactctgtcggaccccgttgcgcgctcggaaggcgcgacggcctcaaatgggtatcaattgaaccaattgggttacgcgcaccaactcgctagcgatggcctgcaaagtgaatcgcccgatggtgttgccttgccaattcaagtggcaacaacgagctacaactatacagtgagccgcgatcctgtccttgttccgccggataaaaacgaagcccctcaattgctgcatcttggtccccgtggtcaaaccgaagctgttcttgcccgcgaaacagcattgactggaaaatggccgactctcgagcgtgagcagcaagtgtatcgcgagtttttggccttatatgacgtaaaaaaagatcttgaggccaaatcagtcggcgtaagacggaaaaaaaaagaagttatttctgcgttagaccgaactgcgcgcttgataagcacgtcgccttcgaaagctcgatccaaagcagagactgaaaaagccattgatgagctcgatgatcgacgagtttatgatccgcgtgatcgagctcaagacaaagcgtttaaacgctgataagtcgccaatatagtgatcatttgcagtattcgcatcgatcgctggttgatattctgccgctggtcgaccggctgctcgtcgccaaaaatgctcacagggatacgatggcctcggtcaggccgcgtgcgtcctgtctttccagttcctccctttcagctcgattgtggcatcatttattgcctgctcattgcagttgaaacgcgatatccgtttcaagacccgggtatggatggtactttggagatatgagcacttgccagacttcccggtcggagacttaaaaattccgataagaggttacggacgacggaccttataagtggatcgtctagtggtggcgccgatcaaaacagttccgcccccggctttgctcaaagtagcaaagcagctttatctcgggttgcggaggattttctagaaaaccgcaattttgcaggagagaacatatggccatcatcaagccgcatgtgaacaaaaataggacaacctcgccgatagagagaccggagtctctcatagaggaaatgagcggcagtcatccgccgagtggttttaccaacctggatctcgctatgatcgagctggaggactttgtccatcggtgcccgctcccagaagacaatcttgctggtcagaaggagtgagacgatggatccgtctagcaatgagaatgtctatgtgggtcgcggtcacaacatcgaaaatgatgatgacactgaccccaggcgttggaagaaggcgaatatcagttccaacaccatctccgatattcagatgacgaatggcgaagacgtacaatcagggagccctacccgaacggaagttgtaagcccacgtctggattatggatcggtcgactcctcctccagcctttattctggcagcgagcacggaaatcaagctgagattcaaaaagagctgtccgtcttgttctcgaacatgtctttgccaggcaacgatcggcgcccggacgaatacattctcgtgcatcaaacgggacaagatgcttttactggtattgccaaaggcaacctcgaccaaatgcccaccaaggcggaatttaacgcgtgctgccgtctctacagggacggagccggtaattactacccgccacctctcgcattcgacaagattagcgttccagagcaactggaggaaaaatgggggatgatggaggcgaaggaacgtaacaaactgcggtttcagtacaagttggacgtatggaatcatgcgcacgctgatatggggatcacgggcacagagatcttttatcaaacagataagaacataaagctcgaccggaattataaactaagacctgaagaccgatacgtacaaacagaaaaatacgggcgccgggaaattcaaaagcgatatcaacacgaactccaggctggttcgctgctgcccgatattatgatcaaaactccccaaaatgacatccacttcgtgtacaggtttgccggcgacaattacgccaacaaacagttcagcgagtttgaacacaccgtcaagcgcaggtatggcgacgagactgagatcaaattgaagtcaaagtcaggcattatgcatgactcgaaatatctggaatcctgggaacggggcagtgcggatattcgcttcgcggaattcgttggggaaaatagagctcacaatcggcagtttccaactgcgacagtaaatatgggacagcagccagacgggcagggcggtttgacccgcgaccgtcatgtgagcgttgacttcctaatgcaaagcgcacccaattcgccttgggcgcaagctttgaaaaagggagaactgtgggatcgcgttcagttgcttgctcgcgacggcaaccgctatctgtcgccgcccagattggaatattctgaccctgcacatttcaccgagttgatgaaccgggttggtttacccgcatcgatgggtcggcaaagccatgcggctagtatcaaattcgaaaagtttgacgcgcaggcagcggttattgtcttaaatggcccagagttacgtgacattcatgacttgtctcctgaaaaactgcaaaatttgtccaccaaagatgtcatcgtcgccgatcgcaatgagaatggtcagagaactggcacgtacaccagcgtcgcggaatatgagcgcttgcagttaaggctgccacccgatgcagcgggggtgcttggtgaagcaactgacaaatattcacgtgatttcgttcggccagagccggcgtcgcgtccaatcagtgacagccgcaggatatacgaaagtcgaccgcgtagccaaagcgtcaacagcttttgacgttcctgctgccgcgtcaacgaggaagctcgtttgacccgggtttgccaatgaaagggctcaatcatggtgaacactacaaagaaaagttttgcgaagtcgcttacggcagatatgcgccgttctgctcagcgcgttgtcgagcaaatgcgaaaagcattgattaccgaagaagaggcgctcaagcggcaagccagactggagagtcccgataggaagcgaaagtatgctgctgatatggcgatagtcgacaaactcgacgtagggtttcgaggcgaaataggctataaaattcttggaaataaccggcttcgagtagacaaccataaagaattaacgcgtgagcacggtagacttcgcaaaaccaaaacggttctgaagcgtaacccggtgacgcaggaagtctatttgggtttatatgaaaggaagtcctggttaagtgtcagcagccatttgtatgctgcggacggcacactccgcatgaagcacgtgaaatacaaagacggacgttttgaggaaaaatgggagcgcgacgaaaatggcgacctgatccgcacaaggtacgccaaccgtggcaggctctttcaacctgtatccgagaaaatgggcgcgccgtatcggagcggccctgacgaccggctctatcgcgatctaacccgtcgaaacggtttcagacgggagacattcgaacgggacgatcacggaaacctcgagcgtatcggcagcaaccatgtcggcttttccaagatttcagtgaaggcacccaatcgtcaaacctcccagacgaagattcaaaaacttggtggcgctttcaacaaatcttttaggtcccttctggacaaggagggcaatgaaatgggccgcgatattttgagccatcgacggctctataacaagcggtctgctgtctacgatgaagctaccggacaattgaagagtgccaagcataccttcggcaagatctacaggagcgaaaccgaatatctcagcgcgggcctcaagaaggtttcaaaaaagatactcggggtgacggtctaccggaaatttgcggcgctcagcgagcgagaatccgaggctgagagactgcgtagttttgaatccggtgcgcatcgccagatctggcaggagcgggcagcgattcccggttcgcccctcccggagactgatgacattcatttcgcacagcagtcgcacctagccaaagccaaccctgatcacgtcgaagctgacgtcacgcgtgtgacagatcaacatgttgatgttgctggacaaacatcatcgtctccccaacggaacttggaaggatggttagattctcaatcacgatacaagccagcaaacatgctgttgtcaaatccagaccttcaagcgaacggacctcgcccatacgaagggttagctcatctcaccctccggcgcgataatgaatctgacgggcacaaggagaatgatcagcggctgcgacatttctcccagccagagccgttggtgttaccgcatcccgggtcgccggaaataactaaggtgtttggctcgcggggagagccggcacacccgagtggaaatctgcacacggcggttggagaaacggcttgcgaaggaccggtgatgtcttcatcctcggacaatcatcagccagctccaggacagcaagaacttttaagtttccttcataatgcgccagccccagtttctgtggcaatacatgatgatcaagagcgacttgcgggggaggcgcccggcggctctttcagaggtagctcagggcgaacgagttcaatgtcggagagtatcttcgacgaagatgtacaagggcatttggtacgggattattcgatcaatactactaacgggtttattgacccgcaatcgttgttcggtgaaccggacttatcgagaggtccaaaatcggggccagaaattccatcggaagattaccatttgtcagcttcggaacaggaaaatttgctgaatcaattgcttagtgtgccactgccggttccttcaccgaagcccgaatgcgcgaggtctatgattttcgaaggttcacgttcaagagagcgttccacctccagagggttctaaggtggaacgcgtctaggcttgcctatcatcaccacctcatgatggtcgcggagaccttcgaagagatatccgacatcattggagaagctgggccggaaactagtgtacctcgcgaatgcatctagatccaatccaatatgcatggcatgccgaatccatgtgggagtttattcttgacacagatatttatgatataataactgagtaagcttaacataaggaggaaaaacatatgttacgcagcagcaacgatgttacgcagcagggcagtcgccctaaaacaaagttaggtggctcaagtatgggcatcattcgcacatgtaggctcggccctgaccaagtcaaatccatgcgggctgctcttgatcttttcggtcgtgagttcggagacgtagccacctactcccaacatcagccggactccgattacctcgggaacttgctccgtagtaagacattcatcgcgcttgctgccttcgaccaagaagcggttgttggcgctctcgcggcttacgttctgcccaagtttgagcagccgcgtagtgagatctatatctatgatctcgcagtctccggcgagcaccggaggcagggcattgccaccgcgctcatcaatctcctcaagcatgaggccaacgcgcttggtgcttatgtgatctacgtgcaagcagattacggtgacgatcccgcagtggctctctatacaaagttgggcatacgggaagaagtgatgcactttgatatcgacccaagtaccgccacctaataatgtctaacaattcgttcaagccgacgccgcttcgcggcgcggcttaactcaagcgttagatgcactatacgtaccaatccaaatcggatccccctgcagggctgagataggtgcctcactgattaagcattggtaactgtcagaccaagtttactcatatatactttagattgatttaaaacttcatttttaatttaaaaggatctaggtgaagatcctttttgataatctcatgaccaaaatcccttaacgtgagttttcgttccactgagcgtcagaccccgtagaaaagatcaaaggatcttcttgagatcctttttttctgcgcgtaatctgctgcttgcaaacaaaaaaaccaccgctaccagcggtggtttgtttgccggatcaagagctaccaactctttttccgaaggtaactggcttcagcagagcgcagataccaaatactgtccttctagtgtagccgtagttaggccaccacttcaagaactctgtagcaccgcctacatacctcgctctgctaatcctgttaccagtggctgctgccagtggcgataagtcgtgtcttaccgggttggactcaagacgatagttaccggataaggcgcagcggtcgggctgaacggggggttcgtgcacacagcccagcttggagcgaacgacctacaccgaactgagatacctacagcgtgagctatgagaaagcgccacgcttcccgaagggagaaaggcggacaggtatccggtaagcggcagggtcggaacaggagagcgcacgagggagcttccagggggaaacgcctggtatctttatagtcctgtcgggtttcgccacctctgacttgagcgtcgatttttgtgatgctcgtcaggggggcggagcctatggaaaaacgccagcaacgcggcctttttacggttcctggccttttgctggccttttgctcacatgttctttcctgcgttatcccctgattctgtggataaccgtattaccgcctttgagtgagctgataccgctcgccgcagccgaacgaccgagcgcagcgagtcagtgagcgaggaagcggaagagcgcctgatgcggtattttctccttacgcatctgtgcggtatttcacaccgcatatggtgcactctcagtacaatctgctctgatgccgcatagttaagccagtatacactccgctatcgctacgtgactgggtcatggctgcgccccgacacc

SEQ ID NO: 45 - DNA, 34 bp, Artificial Sequence
  FRT
gaagttcctattctctagaaagtataggaacttc

SEQ ID NO: 46 - DNA, 879 bp, Arabidopsis thaliana
atggagcctcctcagcaccaacatcaccaccatcaggccgatcaagagtccgggaacaacaacaacaacaagtccggttccggagggtacacttgcagacagacctccaccagatggacacctaccactgagcagatcaagatcctgaaggagttgtactacaacaatgccatccgctcccctactgctgatcagattcagaagatcaccgctcgcctgcgtcaattcggtaagatcgagggtaagaacgtcttctactggttccagaaccacaaggctcgtgagaggcagaagaagcgtttcaacgggactaacatgaccactccttcctcatcacccaattctgttatgatggccgccaacgaccactaccatcctttgcttcatcaccaccacggagttcctatgcaaagacccgcaaactccgtcaacgtgaagttgaaccaggaccatcacctctaccaccacaacaagccctacccctctttcaacaacgggaatctcaaccatgcctcctctggaaccgaatgtggagttgtcaacgcctccaacggctacatgtcttcccacgtgtacggctctatggagcaagattgctccatgaactacaacaacgttggaggcggatgggcaaacatggatcaccactactcctccgctccctacaacttcttcgatagggctaaacctctcttcggcttggagggacaccaagaagaagaggaatgcggaggtgatgcttacttggaacacagaaggactctccctctctttccaatgcacggtgaggaccacatcaacggaggatctggcgctatctggaagtatggacagtccgaggtcagaccatgcgcttccctggaattgagactgaactag

SEQ ID NO: 47 - protein, 292 aa, Arabidopsis thaliana
MEPPQHQHHHHQADQESGNNNNNKSGSGGYTCRQTSTRWTPTTEQIKILKELYYNNAIRSPTADQIQKITARLRQFGKIEGKNVFYWFQNHKARERQKKRFNGTNMTTPSSSPNSVMMAANDHYHPLLHHHHGVPMQRPANSVNVKLNQDHHLYHHNKPYPSFNNGNLNHASSGTECGVVNASNGYMSSHVYGSMEQDCSMNYNNVGGGWANMDHHYSSAPYNFFDRAKPLFGLEGHQEEEECGGDAYLEHRRTLPLFPMHGEDHINGGSGAIWKYGQSEVRPCASLELRLN

SEQ ID NO: 48 - DNA, 876 bp, Lotus japonicus
atggaacaaccacctcaacaacaacaacagaatgaggatggtggtgggagtagtggtggaaaaggggggtttctgagcaggcaaagcagtacacggtggactcccaccacagaccagataagaatattgaaggagctttactacaacaatggaataagatccccgagtgcagagcagattcagaggatctctgctcggctgagacagtacggcaagattgaaggcaagaatgtcttttactggttccagaaccacaaagctagagagaggcagaagaaaaggttcacttctgaaactcatcttcttcccaatcccatacaacaacaacaaagaaatggaactaatgctgcttggaagcaacctgaagaacaacccattattaaccacaccaagtattctagtaacaacatttcagctcctgcagggatcatcacttctgctccatcttcttctgcagagattgtttctgttggccagataggaaactttggttatggatctttgcctatggaaaagagttttagggactgctcaatatctgctggaggcaacacaggctatgctggaagtgctataaaccacaacctgggatggatgggtgtggatccatattcctcagcctacaccaatttctttgacaaaataaggccaactgaagaagaaaccatggaagaagaaggacaagagaatggttcaccagagattgaaacccttcctttattcccgatgcatggtgaggacattcatagtggctatttcaacctcaagtctaattcttctcactatgctggtggctggtaccagactgaagaagggtacttcaacaatggttctcgtgcttccttggagctcagcctcaaatatcctgattttgct

SEQ ID NO: 49 - protein, 292 aa, Lotus japonicus
MEQPPQQQQQNEDGGGSSGGKGGFLSRQSSTRWTPTTDQIRILKELYYNNGIRSPSAEQIQRISARLRQYGKIEGKNVFYWFQNHKARERQKKRFTSETHLLPNPIQQQQRNGTNAAWKQPEEQPIINHTKYSSNNISAPAGIITSAPSSSAEIVSVGQIGNFGYGSLPMEKSFRDCSISAGGNTGYAGSAINHNLGWMGVDPYSSAYTNFFDKIRPTEEETMEEEGQENGSPEIETLPLFPMHGEDIHSGYFNLKSNSSHYAGGWYQTEEGYFNNGSRASLELSLKYPDFA

SEQ ID NO: 50 - DNA, 888 bp, Glycine max
atggaacctcaacaacaacaacaacaagcacaagggagccaacaacaacaacaaaacgaggatggtggcagtggaaaaggggggtttctgagcaggcaaagtagtacacggtggactccaacaaacgaccagataagaatattgaaggaactttactacaacaatggaattagatccccgagtgcagagcagattcagaggatctctgctaggctgaggcagtacggtaagattgaaggcaagaatgtcttttattggttccagaaccacaaagctcgagaaaggcagaagaaaaggttcacttctgatcataatcataataatgtccccatgcaaagacccccaactaatccttctgctgcttggaaacctgatctagctgatcccattcacaccaccaagtattgtaacatctcttctactgcagggatctcttcggcatcatcttctgttgagatggttactgtgggacagatggggaattatgggtatggttctgtgcctatggagaaaagttttagggactgctcgatatcagctgggggtagcagtggccatgttggattaataaaccacaacttggggtgggttggtgtggacccatataattcctcaacctatgccaacttctttgacaaaataaggccaagtgatcaagaaacccttgaagaagaagcagagaacattggtgctactaagattgaaaccctccctttattccctatgcacggtgaggacatccacggctattgcaacctcaagtctaattcgtataactatgatggaaacggctggtatcatactgaagaagggttcaagaatgcttctcgtgcttccttggagctcagtctcaactcctacactcgcaggtctccagattatgcttaa

SEQ ID NO: 51 - protein, 295 aa, Glycine max
MEPQQQQQQAQGSQQQQQNEDGGSGKGGFLSRQSSTRWTPTNDQIRILKELYYNNGIRSPSAEQIQRISARLRQYGKIEGKNVFYWFQNHKARERQKKRFTSDHNHNNVPMQRPPTNPSAAWKPDLADPIHTTKYCNISSTAGISSASSSVEMVTVGQMGNYGYGSVPMEKSFRDCSISAGGSSGHVGLINHNLGWVGVDPYNSSTYANFFDKIRPSDQETLEEEAENIGATKIETLPLFPMHGEDIHGYCNLKSNSYNYDGNGWYHTEEGFKNASRASLELSLNSYTRRSPDYA

SEQ ID NO: 52 - DNA, 897 bp, Camelina sativa
atggagccaccgcagcatcagcatcatcaccatcaagccgaccaagaaagcggcaataacaacaagtccggttctggtggttacacttgtcgccaaaccagcacgaggtggacaccaacgacggagcagatcaaaatgctcaaagagctttattacaatagtggaatccggtcaccaacagcagatcagatccagaagatcactgctaggctgcgacagttcggaaagatcgagggcaagaacgtcttttactggttccagaaccacaaggctcgtgagcgtcagaagaagagattcaacggcacaaccatgaccacaccgtcttcatctcccaactcggttatgatggctaatgatcattatcatcaacatctccctctacttcaccatcatcatggcgttcccatgcagagacctgcgaactccgtcaacgttaaacttaaccaagagcatcatctctatcatcagaacaagtcatatcccagcttcaataacgggaatttaaatcatgcaagctcaggtactgaatgtggtgctgttaatgcttctaatggctactcaagtagccatatctatggatctatggaacaagactgttctatgaattacaacaacgtaggtggaggatggacggcaaacatggatcataatcatcattactcatcagcaccttacaacttcttcgatagaccaaaacctccgtttggtctagacggtcatcaggaagaagaagaatgtggtggcgatgcttatctggaacatcgacgtacgcttcctctcttccctatgcatggtgaagatcacataaatggtgccagctggaagtatggccaactggacggtcatgattgtcatggtagaggcccttgcgcttctcttgagcttcgtttgaactag

SEQ ID NO: 53 - protein, 298 aa, Camelina sativa
MEPPQHQHHHHQADQESGNNNKSGSGGYTCRQTSTRWTPTTEQIKMLKELYYNSGIRSPTADQIQKITARLRQFGKIEGKNVFYWFQNHKARERQKKRFNGTTMTTPSSSPNSVMMANDHYHQHLPLLHHHHGVPMQRPANSVNVKLNQEHHLYHQNKSYPSFNNGNLNHASSGTECGAVNASNGYSSSHIYGSMEQDCSMNYNNVGGGWTANMDHNHHYSSAPYNFFDRPKPPFGLDGHQEEEECGGDAYLEHRRTLPLFPMHGEDHINGASWKYGQLDGHDCHGRGPCASLELRLN

SEQ ID NO: 54 - DNA, 897 bp, Capsella rubella
atggagccaccacagcatcagcatcatcatcatcaagccgaccaagaaagcggcaacaacaacaacaagtccggctctggtggctacacgtgtcgccaaaccagcactaggtggacaccaacgacggagcagatcagaatcctcaaggatctttactacaacagtgcgatccggtcaccaacagccgatcagatccagaagatcaccgcgaggctgagacagtacgggaagatcgaaggcaagaacgtcttttactggttccagaaccataaggctcgtgagcgtcagaagaagagattcaacggcacaaccatgaccactccatcttcatctcccaactcggttatggtggctaatgatcactatcatcctctacttcaccatcatcatggtgttcccatgcaaaggcctgctaactccgtcaacgtcaaacttaaccaagaccatcatctctatcatcagaacaagtcatatcccaccttcaacaatgggaatttaaatcatggaagctcaggtactgaatgtggtgttgttaatgcttctaatggctacatgagtagccatgtctatggatctatggaacaagactgttcaatgaactacaacaacgtaggtactggaggatacggatcaaacatggatcatagtcatcattactcatctgcaccatacaacttctttgatagatcaaagcctctctttggtctagaaggtcatcaagaagatgaagaagaatatggtataggcgatgcttatctggaacatcgacgtacgcttcctctcttccctatgcatggtgaagatcacatgaacggtagtggtgctagctggaagtttgatggccgtgattgccatggtagaggcccttgcgcttctcttgagcttcgtctgaactag

SEQ ID NO: 55 - protein, 298 aa, Capsella rubella
MEPPQHQHHHHQADQESGNNNNKSGSGGYTCRQTSTRWTPTTEQIRILKDLYYNSAIRSPTADQIQKITARLRQYGKIEGKNVFYWFQNHKARERQKKRFNGTTMTTPSSSPNSVMVANDHYHPLLHHHHGVPMQRPANSVNVKLNQDHHLYHQNKSYPTFNNGNLNHGSSGTECGVVNASNGYMSSHVYGSMEQDCSMNYNNVGTGGYGSNMDHSHHYSSAPYNFFDRSKPLFGLEGHQEDEEEYGIGDAYLEHRRTLPLFPMHGEDHMNGSGASWKFDGRDCHGRGPCASLELRLN

SEQ ID NO: 56 - DNA, 588 bp, Arabis alpina
atggctactcatgtagccattagaagcattaacagcaccacattcagaacctgaacttgcatgatttaaattcccgttattgaagctgggatatgatttgttctgatgaagcagatggtgttcttggtcatgaagcttaacgttgagagaagcaggtctctgcatggaaacaccatgatgatgttgaagaagaggatgatgatgatggttatgatgataacgatcactggccatcataactgagttgggcgatgaagacgttggtgtggtggtcatggttgtgccattgaatctcttcttctgacgctcacgagccttatggttctgaaaccagtaaaagacgtttttgccctcgatcttaccatattgtctcagccttgcagagatcttctggatctcatcagcagttggtgaccggattccactattgtagtaaagatctttgaggattctgatttgctccgtggttggagtccatctcgtgctggtttgacgacaagtgtaaccaccagaaccggacttgttgttgttgttgccgctttcttggtcggcttgatgatgatgatgatgatgttgcggtggctccat

SEQ ID NO: 57 - protein, 304 aa, Arabis alpina
MEPPQHHHHHHQADQESGNNNNKSGSGGYTCRQTSTRWTPTTEQIRILKDLYYNSGIRSPTADEIQKISARLRQYGKIEGKNVFYWFQNHKARERQKKRFNGTTMTTTPTSSSPNSVMMASDRYHHNHHHHPLLQHHHGVSMQRPASLNVKLHDQEHHLLHQNKSYPSFNNGNLNHASSGSECGAVNASNGYMSSHVYGSMEQDYSMSNNNIGGGGWSNMDHNHHYSSPAYNFFDRPKPLFGLEGHQEEDQYGGDAYLEHRRTLPLFPMHGEDHINGGGGAIWKYRQLDGLELRLNSYAGVAPE

SEQ ID NO: 58 - DNA, 873 bp, Raphanus sativus
atggagccaccgcaacattaccatcaagccgatcaagaaagcggcaacaacaacaagtccgtctctggtggttacacgtgtcgtcaaacgagcacaagatggacaccaacaaccgatcaaatcagaatactcaaagatctttactacaacaatggagtccggtcaccaacagccgaccagatccagaagatctctgcaacgctgagacagtacggaaaaatcgagggaaaaaatgtcttttactggtttcaaaaccataaggctcgtgagcgacagaagaagagattcaacagcacaaccatggccacaccaacgtcttcatcgcccaactcggttatgatgatggctagtgatcaccatcatcatcatggtgttaccatccagagacctgctttggtcaacgttaagctcgaccaagaaaatcatatgtttcaccagaacagatcatatcccagctccaataacgggagtataaatcatgcaagttcaggcacggaatatggtgttttcggcgcttctaatggctacattagtaaccatatctatggatctatggaacaagactgttcaatgagctacaacagcgtaggtggaggatggacaaacatggatcataatcatcattactcaactccagcttacaacttctttgatagaccatcgcctctgtctggactagaaggtcatcaagaagaaggacaatatggtggcgattcttatctggaacatcgacgtacacttcctctcttccctttgcacggtgaggatcacatcaacggtggtggtggttccatcttgaagtacggacaatcagacggttgtgatcgttatggtagaggcccttgtgcttctcttaagctatgtctgaactga

SEQ ID NO: 59 - protein, 290 aa, Raphanus sativus
MEPPQHYHQADQESGNNNKSVSGGYTCRQTSTRWTPTTDQIRILKDLYYNNGVRSPTADQIQKISATLRQYGKIEGKNVFYWFQNHKARERQKKRFNSTTMATPTSSSPNSVMMMASDHHHHHGVTIQRPALVNVKLDQENHMFHQNRSYPSSNNGSINHASSGTEYGVFGASNGYISNHIYGSMEQDCSMSYNSVGGGWTNMDHNHHYSTPAYNFFDRPSPLSGLEGHQEEGQYGGDSYLEHRRTLPLFPLHGEDHINGGGGSILKYGQSDGCDRYGRGPCASLKLCLN

SEQ ID NO: 60 - DNA, 885 bp, Brassica napus
atggagccagcgcaacatcaccatcaagccgaccaagaaagcggcaacaacaacaagtccgtctctggtggttacacgtgtcgtcaaacgagtacaagatggacaccaacgaccgatcaaatcagaatactcaaagatctttactacaacaacggagtccggtcaccaacagccgaccagatccagaagatctctgcaaggctgagacagtacggaaagatcgagggaaaaaatgtcttttactggtttcaaaaccataaggctcgtgagcgacagaagaagagattcaacagcacaaccatgaccataccaacgtcttcatcgcccaactcggttatgatggctagtgatcactatcaccataaccatcatcatcatggcgttaccatccagagacctgctttggtcaacgttaagctcgaccaagaaaatcatatgtttcatcagaacagatcatatcccagcttcaataacgggaatacaaatcatgcaagttcaggcacggaatatggtgttttcagtgcttctaatggctacattagtagccatatctatgaacctatggaacaagactgttcaatgagctacaacaacgtaggtggaggatggacaaacatagatcataatcaccattactcaactccagcctacaacttcttagatagaccaatgcctctgtctggactagaaggtcatcatcaagaagaaggagaatatggtggcgatgcttatctggaacatagacgcacacttcctctcttccctttgcacggtgaggatcacatcaacggcggtggtggttccatctggaagtacagacaatcggacggttgtgatcgttatggtagaggcccttgtgcttctcttaagctgtgtctgaactga

SEQ ID NO: 61 - protein, 294 aa, Brassica napus
MEPAQHHHQADQESGNNNKSVSGGYTCRQTSTRWTPTTDQIRILKDLYYNNGVRSPTADQIQKISARLRQYGKIEGKNVFYWFQNHKARERQKKRFNSTTMTIPTSSSPNSVMMASDHYHHNHHHHGVTIQRPALVNVKLDQENHMFHQNRSYPSFNNGNTNHASSGTEYGVFSASNGYISSHIYEPMEQDCSMSYNNVGGGWTNIDHNHHYSTPAYNFLDRPMPLSGLEGHHQEEGEYGGDAYLEHRRTLPLFPLHGEDHINGGGGSIWKYRQSDGCDRYGRGPCASLKLCLN

SEQ ID NO: 62 - DNA, 885 bp, Brassica oleracea
atggagccagcgcaacatcaccatcaagccgaccaagaaagcggcaacaacaacaagtccgtctctggtggttacacgtgtcgtcaaacgagtacaagatggacaccaacgaccgatcaaatcagaatactcaaagatctttactacaacaacggagtccggtcaccaacagccgaccagatccagaagatctctgcaaggctgagacagtacggaaagatcgagggaaaaaatgtcttttactggtttcaaaaccataaggctcgtgagcgacagaagaagagattcaacagcacaaccatgaccataccaacgtcttcatcgcccaactcggttatgatggctagtgatcactatcaccataaccatcatcatcatggcgttaccatccagagacctgctttggtcaacgttaagctcgaccaagaaaatcatatgtttcatcagaacagatcatatcccagcttcaataacgggaatataaatcatgcaagttcaggcacggaatatggtgttttcagtgcttctaatggctacattagtagccatatctatggacctatggaacaagactgttcaatgagctacaacaacgtaggtggaggatggacaaatatagatcataatcaccattactcaactccagcctacaacttcttagatagaccaatgcctctgtctggactagaaggtcatcatcaagaagaaggagaatatggtggcgatgcttatctggaacatagacgcacacttcctctcttccctttgcacggtgaggatcacatcaacggcggtggtggttccatctggaagtacagacaatcggacggttgtgatcgttatggtagaggcccttgtgcttctcttaagctgtgtctgaactga

SEQ ID NO: 63 - protein, 294 aa, Brassica oleracea
MEPAQHHHQADQESGNNNKSVSGGYTCRQTSTRWTPTTDQIRILKDLYYNNGVRSPTADQIQKISARLRQYGKIEGKNVFYWFQNHKARERQKKRFNSTTMTIPTSSSPNSVMMASDHYHHNHHHHGVTIQRPALVNVKLDQENHMFHQNRSYPSFNNGNINHASSGTEYGVFSASNGYISSHIYGPMEQDCSMSYNNVGGGWTNIDHNHHYSTPAYNFLDRPMPLSGLEGHHQEEGEYGGDAYLEHRRTLPLFPLHGEDHINGGGGSIWKYRQSDGCDRYGRGPCASLKLCLN

SEQ ID NO: 64 - DNA, 882 bp, Helianthus annuus
atggaaactcaacaacaacaagcagatattcaagattttgggaacaaaaacagtaacacctatgcatgcaggcaaagcagtactaggtggacacccacaagtgatcagatcagaatactgaaagagctctactacaacaatggaatcagatcaccaactgctgatcagattcagagaatcgctgctcaactcagacagtacggcaagattgaaggcaagaacgtgttttattggtttcagaaccataaagctcgtgaacgccagaagaaacggttcactcctactgctcctccaccaccgtctcacttctccgatcatattaaccaccatcttcccaacgctgcccccatgcagattccgtctcaccaccaccactaccaccatcaagaaccaccacatgtctatgctcaccctcacaaactctacaccactcatcacattggggttggttcttcttcacaaggagtgatgggtgtagggtgtggctatggatctgttgctatggagaagagtttcaggaagtgttcaatatcaccaccgggagagagtaaggccacaggaggaattggccggaatatcggttcaagatcacggataagtgtcgattcgtgttccttcttcgacacaattaagccaaagacatatgagatgtttgagaatcatgatcaagatgaagaacaaggagagccttcaactgagatcgaaacacttccattattcccgattcacgacggcaaccatcatgatttcttcggcatgaggacggcaaatctgcaattggagcaaggcactggaggttactacactggaggaagctggtatcggtctgatgagagggcgtctcttgagctcagtctcaactcatatggttattataactaa

SEQ ID NO: 65 - protein, 293 aa, Helianthus annuus
METQQQQADIQDFGNKNSNTYACRQSSTRWTPTSDQIRILKELYYNNGIRSPTADQIQRIAAQLRQYGKIEGKNVFYWFQNHKARERQKKRFTPTAPPPPSHFSDHINHHLPNAAPMQIPSHHHHYHHQEPPHVYAHPHKLYTTHHIGVGSSSQGVMGVGCGYGSVAMEKSFRKCSISPPGESKATGGIGRNIGSRSRISVDSCSFFDTIKPKTYEMFENHDQDEEQGEPSTEIETLPLFPIHDGNHHDFFGMRTANLQLEQGTGGYYTGGSWYRSDERASLELSLNSYGYYN

SEQ ID NO: 66 - DNA, 795 bp, Populus trichocarpa
atggaacctcaccaacaacaaccaaatgaggataataacggtggcgccaaagggaactttctttgcaggcaaaccagtacaaggtggaatcccactactgaccagataagaatattgaaggaactgtactacatcaaaggtgttaggtccccaaatggagctgagattcagcagatctctgctaggcttagaaagtacggcaagattgaaggcaagaatgtattttattggtttcagaaccataaagctcgtgagaggcaaaagaaaagactcaccaatgaagtccccatgcaacaaagaactgcctggaaacctgaagattattactcttacaagtactccaacagtaataataatcctgggttttcttcggcttcttcatctgcaaataccggtgtggttactgttgggcagacagatagccatggatatggatcggtaaccatgcaggagaagaattcttgggactgttcagcaccagctggtggtagcaatggtgctggtagtggatccatgagcaatattaactatggatcaggggttgacattaactctcacagttcatcctatgctgtatttggtcaagaacaagaagcagctgcaaagattgagactcttcctctatttccaatgcttggtgaggacatcagtagctctttcaacatcaacaatatcaacccagacttttattacagtagcggctgtggctatggtgattatggcaatgacacttcttcccgtacttccctggaccttagtctctactcctacaatggccaaccacaagattattaa

SEQ ID NO: 67 - protein, 264 aa, Populus trichocarpa
MEPHQQQPNEDNNGGAKGNFLCRQTSTRWNPTTDQIRILKELYYIKGVRSPNGAEIQQISARLRKYGKIEGKNVFYWFQNHKARERQKKRLTNEVPMQQRTAWKPEDYYSYKYSNSNNNPGFSSASSSANTGVVTVGQTDSHGYGSVTMQEKNSWDCSAPAGGSNGAGSGSMSNINYGSGVDINSHSSSYAVFGQEQEAAAKIETLPLFPMLGEDISSSFNINNINPDFYYSSGCGYGDYGNDTSSRTSLDLSLYSYNGQPQDY

SEQ ID NO: 68 - DNA, 843 bp, Vitus vinifera
atggaacctcaacaacagctccagcagcagcagcaacaaaaccaacaacagccaaacgaggatagcggcagcagcaaaggcagttttctgtgcaggcaaagcagtacacgctggactcctacaactgaccagataagaatattgaaggacctttactacaacaatggagttaggtccccaagtgctgaacagattcagaggatctcagctaggctgaggcagtacggcaagatcgaaggcaagaacgtcttttattggtttcagaaccataaagctcgtgaaaggcagaagaagcgattcactactgatatgcccatgcaaagatcccttggaaatgccggttggagacctgatgatcccattcacaacaaatttcataccattcccactcctgggatatcttccccatcttcttcttcttcacccagtgtgcttgctgttgggcagatgggaagctttggatatggatctgtggagaggagttttacagactgttcaatatcagcaggtggtggtcgtggtggggttggtggatctataaaccagagcttcgaatgggttggcatggacccatattcttcatcttatgcactctttgacaagagaaaaacaatgggtgaaagcttcgaagaagagcaagaagaagaagcaactccggagattgaaacgctcccactctttcccatgcacgctgaggatatcactggcttttgcaacattaagcccgaatccgacgcctactactccggctggtacaggcccgccgacgccaagaccagttcccgcacttctcttgagcttagcctcaactcctacgccggcaggtccccggattccccctga

SEQ ID NO: 69 - protein, 280 aa, Vitus vinifera
MEPQQQLQQQQQQNQQQPNEDSGSSKGSFLCRQSSTRWTPTTDQIRILKDLYYNNGVRSPSAEQIQRISARLRQYGKIEGKNVFYWFQNHKARERQKKRFTTDMPMQRSLGNAGWRPDDPIHNKFHTIPTPGISSPSSSSSPSVLAVGQMGSFGYGSVERSFTDCSISAGGGRGGVGGSINQSFEWVGMDPYSSSYALFDKRKTMGESFEEEQEEEATPEIETLPLFPMHAEDITGFCNIKPESDAYYSGWYRPADAKTSSRTSLELSLNSYAGRSPDSP

SEQ ID NO: 70 - DNA, 879 bp, Arabidopsis thaliana; identical to SEQ ID NO: 46

SEQ ID NO: 71 - protein, 292 aa, Arabidopsis thaliana; identical to SEQ ID NO: 47

SEQ ID NO: 72 - DNA, 879 bp, Lotus japonicus
atggaacaacctccccaacagcagcaacaaaacgaagacggaggcggatcaagtgggggaaaaggagggttcctcagtaggcagtccagtactaggtggacacccaccacagaccagattcgcatcctcaaggagctctactacaacaacggaatacgctcaccctccgcagaacagatccagaggatctccgcaagactcagacagtacggcaagatcgagggcaagaacgtcttctactggttccaaaaccacaaagcccgcgaaaggcagaagaagcgcttcaccagtgagacacacttgctgcccaacccaattcagcagcaacagcgcaacggaacaaacgcagcttggaagcagccagaggagcaacccatcatcaaccacaccaagtactcctccaacaacatatccgcacccgcagggattatcacaagtgccccatcttcttccgcagaaatagtctccgtggggcagatcggaaacttcggatacggatctctgccaatggagaagtccttcagggactgcagtatctcagccggaggtaacacaggatacgccgggtctgctattaaccacaacctcggatggatgggagtcgacccatactcctctgcttacaccaacttcttcgacaaaatacgcccaacagaggaggagactatggaggaagaaggacaggagaacggctcaccagaaatcgagaccctgcctttgttcccaatgcacggagaggacatccactccggctacttcaacctcaagagtaactcatcccactacgctggcggatggtaccaaactgaggaaggctacttcaacaacggatcacgcgccagtctggagctgtccctgaagtaccctgacttcgcttag

SEQ ID NO: 73 - protein, 292 aa, Lotus japonicus; identical to SEQ ID NO: 49

SEQ ID NO: 74 - DNA, 909 bp, Medicago truncatula
atggaacaacctcagcagcagcagcaaccacagacccaacagcactctccaaacaacggaatcatggggtccagacagagttccaccagatggaccccaacaaccgaccagatccgcattctcaaagacctctactacaacaacggaataaggtctccaagtgccgagcaaatccagaggatctccgcaaggctcagacagtacgggaagatcgagggcaagaacgtcttctactggttccaaaaccacaaagccagagagcgccagaaaaagcgcttcacctccgacgtcaacgtcgtccctatcatccagcgcgcccccaacaacaatactatcataagtgccgccaactggaagcctgaccaccacgaacaacagcagaacattaatgtccacacaaaccactccacatacaacatctcctccgctggcctcagttctgcttcctgctcctcagcagaaatggtcactgtggggcaaataggcaactacggctacgggtctgtcccaatggagaagtctttccgcgaatgcaccatctcagctggatgctcatcatcccaggttggctcaaccataaacccccacatcggctggatcggacaccacgtcgacccatattcaagtgcctacgctaacctcttcgagaaaatacgccccaacgaggagatcatggaagagtacgaccagggacaggaaaacggttccccagagatcgagacactcccactcttccctatgcacggagaagacatccacggagggtattgcaacctcaaatcaaattcctccaactacggaggatggtaccaggcagaagacgcagggttcatgtacggaagtcgtaccacttctctcgagctcagtctgaactcctacggatgcaggtcccccgactacgccaattaa

SEQ ID NO: 75 - protein, 302 aa, Medicago truncatula
MEQPQQQQQPQTQQHSPNNGIMGSRQSSTRWTPTTDQIRILKDLYYNNGIRSPSAEQIQRISARLRQYGKIEGKNVFYWFQNHKARERQKKRFTSDVNVVPIIQRAPNNNTIISAANWKPDHHEQQQNINVHTNHSTYNISSAGLSSASCSSAEMVTVGQIGNYGYGSVPMEKSFRECTISAGCSSSQVGSTINPHIGWIGHHVDPYSSAYANLFEKIRPNEEIMEEYDQGQENGSPEIETLPLFPMHGEDIHGGYCNLKSNSSNYGGWYQAEDAGFMYGSRTTSLELSLNSYGCRSPDYAN

SEQ ID NO: 76 - DNA, 924 bp, Petunia x hybrida
atggaaacagcacagcaccagcagaacaaccaacagcactacctccaccaacacctctccatcggacaaggaacaaacatcgaggacggcagtaacaagaacaactcctccaacttcatgtgcaggcaaaatagtacccgctggacaccaaccactgaccagatcaggatattaaaggacctctactacaacaacggagtcagatcacctaccgctgaacagatccagagaatctccgccaagctcaggcagtacggcaagatcgagggcaagaacgtcttctactggttccagaaccataaagcccgcgagagacaaaagaagcgcctcatcgccgcagccaccaccgataacactaacctcccaatgcagatgcagttccagagaggagtctggagatcctctgcagacgaccccatccaccacaagtatactaatccaggagtgcactgcccttcagcttcttcccacggagttctcgcagtcggacagaacggcaatcacggatacggagccttggcaatggaaaaatccttccgcgactgctccatcagtccaggcagttccatgtcacaccaccaccaccaaaacttcgcttgggcaggagtcgatccttattcctcaaccacaacctaccctttcctcgagaagaccaagcacttcgagaatgaaaccctcgaagctgatgaagagcagcaagaggaggaccaggagaactactactaccaaaggaccacctctgccatcgaaaccctgcctctcttccctatgcacgaggagaacatctcctccttctgcaacctcaagcaccaggagtcatccggaggattctacaccgagtggtacagagcagacgacaacctcgcagcagccagagcttccctcgagctctccttgaactccttcatcggcaactcctcctag

SEQ ID NO: 77 - protein, 307 aa, Petunia x hybrida
METAQHQQNNQQHYLHQHLSIGQGTNIEDGSNKNNSSNFMCRQNSTRWTPTTDQIRILKDLYYNNGVRSPTAEQIQRISAKLRQYGKIEGKNVFYWFQNHKARERQKKRLIAAATTDNTNLPMQMQFQRGVWRSSADDPIHHKYTNPGVHCPSASSHGVLAVGQNGNHGYGALAMEKSFRDCSISPGSSMSHHHHQNFAWAGVDPYSSTTTYPFLEKTKHFENETLEADEEQQEEDQENYYYQRTTSAIETLPLFPMHEENISSFCNLKHQESSGGFYTEWYRADDNLAAARASLELSLNSFIGNSS

SEQ ID NO: 78 - DNA, 864 bp, Phaseolus vulgaris
atggaaccacagcagccccagggcagtcaaccaaacgaggacggtggaagtgggaaaggcggatttctctccagacagtcctccactaggtggactccaaccactgaccagatcagaatactcaaagacctctactacaacaacggaatcagatccccttccgcagaacagatccaaaggatctccgctaggctcagacagtacgggaagatcgagggcaagaacgtcttctactggttccaaaaccacaaggccagggagagacagaagaagaggttcacctccgacaacgtccccatgcaaagacctgcaccaacaaatgctgcacctccttggaaacccgaccaagaccccattcacaccaagtactccaacatctcctccacaggaatctccagtgcatcctcctcctcagtcgagatgatcaccgtcggacaaatggggaactacgggtacggaagtgtgccaatggaaaagtccttcagagactgctccatatccgccggaggatcttccggtcatgttggaataaaccacaacctcggctgggtgggagtcgatccttactcttctgcatacgccaacttcttcgataaaataagaccaaacgaagagaccctcgaggaagaagaagaggaggaggaggaggaagaagaagaggacggaggagcagaaattgagaccctccccctgttcccaatgcacggagaggacattcacggctactgcaacctcaagtccaacagttacaactacgacggcaacggctggtatcacagtgaggatggcttcaaaaacggcagtagggcctccctcgagctctccctcaactcttacaccagaagatcccccgacttcgcatag

SEQ ID NO: 79 - protein, 287 aa, Phaseolus vulgaris
MEPQQPQGSQPNEDGGSGKGGFLSRQSSTRWTPTTDQIRILKDLYYNNGIRSPSAEQIQRISARLRQYGKIEGKNVFYWFQNHKARERQKKRFTSDNVPMQRPAPTNAAPPWKPDQDPIHTKYSNISSTGISSASSSSVEMITVGQMGNYGYGSVPMEKSFRDCSISAGGSSGHVGINHNLGWVGVDPYSSAYANFFDKIRPNEETLEEEEEEEEEEEEEDGGAEIETLPLFPMHGEDIHGYCNLKSNSYNYDGNGWYHSEDGFKNGSRASLELSLNSYTRRSPDFA

SEQ ID NO: 80 - DNA, 963 bp, Zea mays
atggcggccaacgtgggcgcgggcaggagtgctggcggcggcggagccggcactggcactggcactgctgctggcagcggcggcgtgtcgacggccgtgtgccgccctagcggctcgcggtggacgccgacgccggagcagatcaggatcctcaaggagctctactacggctgcggcatccggtcgcccaactcggagcagatccagcgcatcaccgccatgctgcggcagcacggcaagatcgagggcaagaacgtcttctactggttccagaaccacaaggcccgcgagcgccagaagcgccgcctcaccaacctcgacgtcaacgtgcccgtcgccgccgacgacagcgcccaccgccttggcgtcctctcgttgtcgccttcttcaggttgttcaggcgcggcgcctccgtcgcccaccctcggcttctacgccggcggcaatggctccgctgtgatgctggacacgagttccgattggggcagcgctgctgccatggccactgaggcatgcttcatgcaggactacatgggcgtgatgggcggcgcgtcaccgtgggcatgctcctcctcgtcgtcggaggacccgatggcggcgctggcgctggcgccgaaggtgacccgggcgcccgagacgctccctctcttcccgaccggcggcggcggagacgataggcagcccccgcggccgcggcagtctgtcccagcaggcgaggccatccgcggcggcagcagcagcagcagctaccttccgttctggggtgccgcgcccaccccaactggcagtgccacttccgttgcgatccagcagcaacaccagctgatgcagatgcaagagcagtacagcttttacagcaacgcccagctgctgcccggcaccggcagccaggatgcagcagcaacatccctggagctgagcctcagctcctggtgctccccttaccctgcagggaccatgtga

SEQ ID NO: 81 - protein, 320 aa, Zea mays
MAANVGAGRSAGGGGAGTGTGTAAGSGGVSTAVCRPSGSRWTPTPEQIRILKELYYGCGIRSPNSEQIQRITAMLRQHGKIEGKNVFYWFQNHKARERQKRRLTNLDVNVPVAADDSAHRLGVLSLSPSSGCSGAAPPSPTLGFYAGGNGSAVMLDTSSDWGSAAAMATEACFMQDYMGVMGGASPWACSSSSSEDPMAALALAPKVTRAPETLPLFPTGGGGDDRQPPRPRQSVPAGEAIRGGSSSSSYLPFWGAAPTPTGSATSVAIQQQHQLMQMQEQYSFYSNAQLLPGTGSQDAAATSLELSLSSWCSPYPAGTM

SEQ ID NO: 82 - DNA, 978 bp, Zea mays
atggcggccaatgcgggcggcggtggagcgggaggaggcagcggcagcggcagcgtggctgcgccggcggtgtgccgccccagcggctcgcggtggacgccgacgccggagcagatcaggatgctgaaggagctctactacggctgcggcatccggtcgcccagctcggagcagatccagcgcatcaccgccatgctgcggcagcacggcaagatcgagggcaagaacgtcttctactggttccagaaccacaaggcccgcgagcgccagaagcgccgcctcaccagcctcgacgtcaacgtgcccgccgccggcgcggccgacgccaccaccagccaactcggcgtcctctcgctgtcgtcgccgccttcaggcgcggcgcctccctcgcccaccctcggcttctacgccgccggcaatggcggcggatcggctgggctgctggacacgagttccgactggggcagcagcggcgctgccatggccaccgagacatgcttcctgcaggactacatgggcgtgacggacacgggcagctcgtcgcagtggccatgcttctcgtcgtcggacacgataatggcggcggcggcggccgcggcgcgggtggcgacgacgcgggcgcccgagacactccctctcttcccgacctgcggcgacgacgacgacgacgacagccagcccccgccgcggccgcggcacgcagtcccagtcccggcaggcgagaccatccgcggcggcggcggcagcagcagcagctacttgccgttctggggtgccggtgccgcgtccacaactgccggcgccacttcttccgttgcgatccagcagcaacaccagctgcaggagcagtacagcttttacagcaacagcacccagctggccggcaccggcagccaagacgtatcggcttcagcggccgccctggagctgagcctcagctcatggtgctccccttaccctgctgcagggagcatgtga

SEQ ID NO: 83 - protein, 325 aa, Zea mays
MAANAGGGGAGGGSGSGSVAAPAVCRPSGSRWTPTPEQIRMLKELYYGCGIRSPSSEQIQRITAMLRQHGKIEGKNVFYWFQNHKARERQKRRLTSLDVNVPAAGAADATTSQLGVLSLSSPPSGAAPPSPTLGFYAAGNGGGSAGLLDTSSDWGSSGAAMATETCFLQDYMGVTDTGSSSQWPCFSSSDTIMAAAAAAARVATTRAPETLPLFPTCGDDDDDDSQPPPRPRHAVPVPAGETIRGGGGSSSSYLPFWGAGAASTTAGATSSVAIQQQHQLQEQYSFYSNSTQLAGTGSQDVSASAAALELSLSSWCSPYPAAGSM

SEQ ID NO: 84 - DNA, 666 bp, Zea mays
atggaggcgctgagcgggcgggtaggcgtcaagtgcgggcggtggaaccctacggcggagcaggtgaaggtcctgacggagctcttccgcgcggggctgcggacgcccagcacggagcagatccagcgcatctccacccacctcagcgccttcggcaaggtggagagcaagaacgtcttctactggttccagaaccacaaggcccgcgagcgccaccaccacaagaagcgacgccgcggcgcgtcgtcgtcctcccccgacagcggcagcggcaggggaagcaacaacgaggaagacggccgtggtgccgcctcgcagtcgcacgacgccgacgccgacgccgacctcgtgctgcaaccgccagagagcaagcgggaggccagaagctatggccaccatcaccggctcgtgacatgctacgtcagggacgtggtggagcagcaggaggcgtcgccgtcgtgggagcggccgacgagggaggtggagacgctagagctcttccccctcaagtcgtacggcgacctcgaggcggcggagaaggtccggtcgtacgtcagaggaagcggcgccaccagcgagcagtgcagggagttgtccttcttcgacgtcgtctccgccggccgggatccgccgctcgagctcaggctctgcagcttcggtccctag

SEQ ID NO: 85 - protein, 221 aa, Zea mays
MEALSGRVGVKCGRWNPTAEQVKVLTELFRAGLRTPSTEQIQRISTHLSAFGKVESKNVFYWFQNHKARERHHHKKRRRGASSSSPDSGSGRGSNNEEDGRGAASQSHDADADADLVLQPPESKREARSYGHHHRLVTCYVRDVVEQQEASPSWERPTREVETLELFPLKSYGDLEAAEKVRSYVRGSGATSEQCRELSFFDVVSAGRDPPLELRLCSFGP

SEQ ID NO: 86 - DNA, 975 bp, Zea mays
atggagacgccacagcagcaatccgccgccgccgccgccgccgccgcccacgggcaggacgacggcgggtcgccgccgatgtcgccggcctccgccgcggcggcggcgctggcgaacgcgcggtggaacccgaccaaggagcaggtggccgtgctggaggggctgtacgagcacggcctgcgcacccccagcgcggagcagatacagcagatcacgggcaggctgcgggagcacggcgccatcgagggcaagaacgtcttctactggttccagaaccacaaggcccgccagcgccagaggcagaagcaggacagcttcgcctacttcagcaggctcctccgccggcccccgccgctgcccgtgctctccatgccccccgcgccaccgtaccatcacgcccgcgtcccggcgccgcccgcgataccgatgccgatggcgccgccgccgcccgctgcatgcaacgacaacggcggcgcgcgtgtgatctacaggaacccattctacgtggctgcgccgcaggcgccccctgcaaatgccgcctactactacccacagccacagcagcagcagcagcagcaggtgacagtcatgtaccagtacccgagaatggaggtagccggccaggacaagatgatgaccagggccgcggcgcaccagcagcagcagcacaacggcgccgggcaacaaccgggacgcgccggccaccccagccgcgagacgctccagctgttcccgctccagcccaccttcgtgctgcggcacgacaaggggcgcgccgccaacggcagtaataacgactccctgacgtcgacgtcgacggcgactgcgacagcgacagcgacagcgacagcgtccgcttccatctccgaggactcggatggcctggagagcggcagctccggcaagggcgtcgaggaggcgcccgcgctgccgttctatgacttcttcgggctccagtcctccggaggccgctga

SEQ ID NO: 87 - protein, 324 aa, Zea mays
METPQQQSAAAAAAAAHGQDDGGSPPMSPASAAAAALANARWNPTKEQVAVLEGLYEHGLRTPSAEQIQQITGRLREHGAIEGKNVFYWFQNHKARQRQRQKQDSFAYFSRLLRRPPPLPVLSMPPAPPYHHARVPAPPAIPMPMAPPPPAACNDNGGARVIYRNPFYVAAPQAPPANAAYYYPQPQQQQQQQVTVMYQYPRMEVAGQDKMMTRAAAHQQQQHNGAGQQPGRAGHPSRETLQLFPLQPTFVLRHDKGRAANGSNNDSLTSTSTATATATATATASASISEDSDGLESGSSGKGVEEAPALPFYDFFGLQSSGGR

SEQ ID NO: 88 - DNA, 543 bp, Zea mays
atgcatggtgtacgtacgtatctcttaattttcattgtatcaaagctgcaggtgcaagtgccgccgacgacgacgacggtgggtggcacgacgcggtggaacccgtcgccggaccagataagggtgctggagatgctgtaccgcggggggatgcgcacgcccaactcgttccagatcgagcagatcacggaggagctcggcaagtacggccggatcgagggcaagaacgtcttctactggttccagaaccacaaggcccgcgagcgccagaagcagaagcgagctgccctcctcaccctcagcaccaccaccactgcttccacgctgctaccaccagctgctgaaaccaaggagggagtggagacgaaaaaagaagaagcgtgtgaagatgcatcgagccgcaagcggaggtgcagggcctgggaagatgtcgtcgtccatggtggcggcgacgatgccggtacggaggtagctgacgactactacaccgacgacgatgtgaccctggagctcttcccgctgcgtcctgatcaggggaaataa

SEQ ID NO: 89 - protein, 180 aa, Zea mays
MHGVRTYLLIFIVSKLQVQVPPTTTTVGGTTRWNPSPDQIRVLEMLYRGGMRTPNSFQIEQITEELGKYGRIEGKNVFYWFQNHKARERQKQKRAALLTLSTTTTASTLLPPAAETKEGVETKKEEACEDASSRKRRCRAWEDVVVHGGGDDAGTEVADDYYTDDDVTLELFPLRPDQGK

SEQ ID NO: 90 - DNA, 708 bp, Zea mays
atggacacggaggcgccgagcgggcgggtgggcgtcaagtgcgggcggtggaacccgacgccggagcaggtgaaggtcctgacggagctcttccgcgcggggctgcggacgcccagcacggaccagatccagcgcatctccgcccacctcggcgccttcggcaaggtggagagcaagaacgtcttctactggttccagaaccacaaggcccgcgagcgccaccaccacaagaagaagaagcgccgccgacgcggcgcggcaatggcatcgtcgtcctcccccgacagcggcagcggcagcgggagcagcgaggaagacggccgtgttgccgccgccgccgacgccgacctcgtgctgcaaccatcgccgggaagaagcaaaagcaaacgggaggccagaagaagctacggcggcggccaccatcgccggctcgttacatgtaagcagctagcgcacacacatcgctacgtcagggacgttgtggagcagcaggaggaggacacgtgggagcggccgacgagggaggcggtggagactctggagctcttccccctcaagtcgtacgtcgacctcgaggcggagaaggtccggcggtacgtcgtcagggccggcgccagcgagcagtgcagggacttctccttcttcgacgtgtccggcggtcgggatccgccgcttcttgagcttaggctctgcagcttcggtccctag

SEQ ID NO: 91 - protein, 235 aa, Zea mays
MDTEAPSGRVGVKCGRWNPTPEQVKVLTELFRAGLRTPSTDQIQRISAHLGAFGKVESKNVFYWFQNHKARERHHHKKKKRRRRGAAMASSSSPDSGSGSGSSEEDGRVAAAADADLVLQPSPGRSKSKREARRSYGGGHHRRLVTCKQLAHTHRYVRDVVEQQEEDTWERPTREAVETLELFPLKSYVDLEAEKVRRYVVRAGASEQCRDFSFFDVSGGRDPPLLELRLCSFGP

SEQ ID NO: 92 - DNA, 1545 bp, Zea mays
atggcctcctccttcaacaacaaaaccagtcactggccgagcatgtttaggtccaagcacgccgctgagccgtggcaggcgcagcctgacatcagcagctcgccgccgtcgctcctctcaggtggcggctctagcagcaccaccaccatcggccgctgcctcaagcaccccctctcaggttactcaggtggcgaggagcggaccccggatccgaagccccggtggaaccccaggccggagcagatccggattctggaggccatcttcaactccggcatggtcaacccgccgcgcgacgagatcccccgcatccgcatgcgcctgcaggagtacggccaggtcggcgacgccaacgtcttctactggttccagaaccgcaagtcccgctccaagaacaagcagcgcaccggacagctggggctgggccttgcgcgcgcgccgggttgcggggccgctgcgccgcccgtcacgccgcagcccttgatccagaaccaattccaggtgctcgcctcgcccgcgcaggcgccagcttcctcgtcctcgtcctcctccgaccgctcctctgggtccagcaagccggcgccgcagccgatgtccgcgacggcagcggccatgaactttccagggccgctcggcgcggcgtgtgcgcagatgtactaccaagcccaccccgtggcgccggtctcggcgttgccagcgcacaaggtgcaggaccctgtagcctccgacgagcccgtcttccagccgtggccacaaggctacttcctgtcggctgccgaggtcgccagcattctcgggggccagtacaggcacgacgtgcccgtgcagcagcagccaccggcgacgttgcctgcgggagcgttcttggggctgtacaacgaggtgacagagccgactgtcactggtcacaggacatgcgcctggggcccggcggggctcgggcagttctggcccgtgggcggcgctgatcaccatcagcaccacaagcacaataccaccgcggcgaccaacaccgtagcaagggacgcggcgcacgagcacgccacgacgctggggttgctgcagtacggcttcgaagctagcgcggccatggagacggcttccgcggcggtgccccttgctgcgtcgccgggaaccgctgcgagcgtggcgacggctgggctcacatctttgcctgcaagtactaatgctgttgtcgtcaactatgatctgctgcaaggactggcagtgcccgggtccgggtccggggccgtcggtgtcagcaccggcggtgcaccgcctgtcgccgttgccgcggcgcccacggcagcgcaggagggcgtcgtcgtagcactgtgcatcacggacagcgtcacgggcaagagcgtggcacacaacgtcgcggctgccaggctcgacgtgagggcgcagttcggcgaggcggccgttctgctccgcgccgtcggcgaccgcggcgggctcgacctcgtgcccgtccccgtcgacgcgttgggctgcacagtggagccgctccagcacggtgccttttactacgtgctggtataa

SEQ ID NO: 93 - protein, 514 aa, Zea mays
MASSFNNKTSHWPSMFRSKHAAEPWQAQPDISSSPPSLLSGGGSSSTTTIGRCLKHPLSGYSGGEERTPDPKPRWNPRPEQIRILEAIFNSGMVNPPRDEIPRIRMRLQEYGQVGDANVFYWFQNRKSRSKNKQRTGQLGLGLARAPGCGAAAPPVTPQPLIQNQFQVLASPAQAPASSSSSSSDRSSGSSKPAPQPMSATAAAMNFPGPLGAACAQMYYQAHPVAPVSALPAHKVQDPVASDEPVFQPWPQGYFLSAAEVASILGGQYRHDVPVQQQPPATLPAGAFLGLYNEVTEPTVTGHRTCAWGPAGLGQFWPVGGADHHQHHKHNTTAATNTVARDAAHEHATTLGLLQYGFEASAAMETASAAVPLAASPGTAASVATAGLTSLPASTNAVVVNYDLLQGLAVPGSGSGAVGVSTGGAPPVAVAAAPTAAQEGVVVALCITDSVTGKSVAHNVAAARLDVRAQFGEAAVLLRAVGDRGGLDLVPVPVDALGCTVEPLQHGAFYYVLV

SEQ ID NO: 94 - DNA, 663 bp, Gnetum gnemon
atggaagaaaacagcaacagcagcagaagcagcaacagcggcgcacgttggaatccgacgccggagcagctgagcattctgaaagagctgtatcatggccgcggaatcaggtcgcccagcgccgaacagatccaccatatctcatggaaactcagctcctacggcaaaatcgagggcaagaacgtcttctactggttccagaaccataaggcccgccagcgtcaaaaagagcgtctcggttccgtcatgcctgcttctgcttcttcttcttcttttgcatctccttctcagggagctgtcggcattcgaaggggaagtacggtgctatgtcttaaggaaacttcagcttcatcttcatcttattcttctgttccgcgttcggtatcagctgtgcgccagtgtgctgcatctcgtgactgtggcttgcaccatgatctgacaactctggagctgtttcccctgcaccgtgaaagtagaatagacgctggggaggaagacgaggagcaacaggaggtggtggtgctagataataataataacacctggacaaggcaccaaaatgtaaatgtgaatcatgcaaataatgacgatgagccacagcatggtcatgggcagattgatattgatgtagggcttcgtctttgcctcggtggatttcgctga

SEQ ID NO: 95 - protein, 220 aa, Gnetum gnemon
MEENSNSSRSSNSGARWNPTPEQLSILKELYHGRGIRSPSAEQIHHISWKLSSYGKIEGKNVFYWFQNHKARQRQKERLGSVMPASASSSSFASPSQGAVGIRRGSTVLCLKETSASSSSYSSVPRSVSAVRQCAASRDCGLHHDLTTLELFPLHRESRIDAGEEDEEQQEVVVLDNNNNTWTRHQNVNVNHANNDDEPQHGHGQIDIDVGLRLCLGGFR

SEQ ID NO: 96 - DNA, 987 bp, Malus domestica
atggaccctcaacagaacccaaatgaagtacaagaaggaggcaacaggcaggggggtggaatcatgtgcaggcaaagcagtacgcggtggacacccacaactgatcagataaaaatcttgaaggacctttactacaacaatggcattaggtcacccagcgctgagcagattcagaggatctctgctaagctgcgacagttcggcaagatcgaaggcaagaacgttttctattggtttcagaaccacaaagctcgtgagaggcagaagaaaagattcacttcttcttctgctcctgatcaccatcatcatgcagcaccaccagtgccagctgtaccaccagaatccaataatatcaggcaaagatcatcaggggttgggattgatattaatgcaactgctgctgctgcttatgaacaagcacccattaatcaccaccgcaagtattccaacatttctgctccaccagccgggttttcttctgcatcttcttcttcagttggtgtgaatgtttctgttggggcacagatgggaaactatgggtatggatccattgctatggagaagagctttagggagtgctcaatatcatctggaggaagtactagcactggtcatgtgggtggatctaattataatacttttaatcacaactatggatcatgggttggtgttgatccatattcctcgccctacactatctttgacaagaaatcctcatcaaaaccagtgtttggtgaccaggaaaatatgacggaagaagaatactacaatctgcaagcttcccaagagattgagactctcccactcttccccatgcacggtgaagacattcatggctttggcaacatcaagtcatcctctatggatggctactactccggctggtacaggtccgatggcggcaacgatggtggctctcgcacttcccttgagcttagcctcaattcctacggtcacatgacccatgattacttcagatcatattga

SEQ ID NO: 97 - protein, 328 aa, Malus domestica
MDPQQNPNEVQEGGNRQGGGIMCRQSSTRWTPTTDQIKILKDLYYNNGIRSPSAEQIQRISAKLRQFGKIEGKNVFYWFQNHKARERQKKRFTSSSAPDHHHHAAPPVPAVPPESNNIRQRSSGVGIDINATAAAAYEQAPINHHRKYSNISAPPAGFSSASSSSVGVNVSVGAQMGNYGYGSIAMEKSFRECSISSGGSTSTGHVGGSNYNTFNHNYGSWVGVDPYSSPYTIFDKKSSSKPVFGDQENMTEEEYYNLQASQEIETLPLFPMHGEDIHGFGNIKSSSMDGYYSGWYRSDGGNDGGSRTSLELSLNSYGHMTHDYFRSY

SEQ ID NO: 98 - DNA, 867 bp, Manihot esculenta
atggaacctcaacaacaacagcagcagcagcaaaaccaacaacaaccaaacgatgacaatagcagcggtgccaaaggaaactttctttgcaggcaaagcagtactaggtggactcccacaactgaccaaataagaatattgaaggacctttactacaacagtggagttaggtccccaagtgcagagcagattcagaggatatctgctaggcttagacagtacggtaagattgaaggcaagaatgtcttttattggtttcagaaccataaagctcgtgagaggcagaagaaaaggttcaccactgatgtccccatgcaacaaagaactgtttcgaatgcttctagttggaagcctgaagactattccttccacaacaaataccccaacattgctcctgggttttcttctgcatctccatcctcagctgctgggcttcctgttggacagatgggaaactatgggtatggatctgtaactatggagaagagttttagggactgctcaatatcagctactgccaacggtggtgttggtggatccatgagccccaactgtgggtgggttggcattgatccctactgttcatcctactctctctttgacaagcaaaaatcaactaatgaaaccctagaagatgaagaacaagatcaagatcaagaagaggaagcaactccagggattgaaaccctccctctcttccctacccagagagaagacatcaatggcttctgcaacatgaagcaccaccccatctgctactccgaaaactactgctatggctctgacgatggaaacaacgcttcgcgtacttccctcgaacttagcctcaactcttacagcaatgggcaggcacgggattccatctaa

SEQ ID NO: 99 - protein, 288 aa, Manihot esculenta
MEPQQQQQQQQNQQQPNDDNSSGAKGNFLCRQSSTRWTPTTDQIRILKDLYYNSGVRSPSAEQIQRISARLRQYGKIEGKNVFYWFQNHKARERQKKRFTTDVPMQQRTVSNASSWKPEDYSFHNKYPNIAPGFSSASPSSAAGLPVGQMGNYGYGSVTMEKSFRDCSISATANGGVGGSMSPNCGWVGIDPYCSSYSLFDKQKSTNETLEDEEQDQDQEEEATPGIETLPLFPTQREDINGFCNMKHHPICYSENYCYGSDDGNNASRTSLELSLNSYSNGQARDSI

SEQ ID NO: 100 - DNA, 960 bp, Kalanchoe fedtschenkoi
atggaagctcaacagcaacagcataatacaatgatgggtgatgaccttggcggtggcaagttggcagccaccagcttcacaagagcgcaaaccaacagcagcaacaaccacagcctagttaataacaacggcggcagaagaagcagcacgaggtggacaccaacaacagaccagataagaatactcaaagatctttactacaacaatggagtgaggtctcccacggtggagcagattcagaggatctctgctaggttgagacagtacggtaagatcgagggcaaaaatgtcttctactggtttcagaaccaaaaggctcgtgaaagacagaagaggaggttcaacacaaccagcaccaccaacaacaacactgctcccgctcctctccctccatcttctactgtttgtaaaccttcttcgctagactcatccactccacacattcacactgcagcagcagctgctgctgctgcctccaaatactcagacatcaacaacaaccaaaaccttatctacccagctgggcacaatcagatgtcaggtttcggatatgctgcctccgtaacaatggagaagagcttcagagattgttctatatcgacgggcgggtcatctttcggttgggctaaaggaggaatgacagatcaccatctgtctcgtcatccctacccgcacacttcaccctatgcaatctacaaccagcggaaatcaataaacagtgatgagtatcacgagctactggcatcatcaacttcggatcatcatgaacatggggataatcggggtccggagattgaaaccctgccactatttcccatgcacggcgaggacatcaactacggcttctgccaccttaattcagccgagactgatggctggttcaatcgcgatgtgggtagtggctctcgtgcgtccctcgagctcagtctcaactcttacgcaggaatggaccacacctag

SEQ ID NO: 101 - protein, 319 aa, Kalanchoe fedtschenkoi
MEAQQQQHNTMMGDDLGGGKLAATSFTRAQTNSSNNHSLVNNNGGRRSSTRWTPTTDQIRILKDLYYNNGVRSPTVEQIQRISARLRQYGKIEGKNVFYWFQNQKARERQKRRFNTTSTTNNNTAPAPLPPSSTVCKPSSLDSSTPHIHTAAAAAAAASKYSDINNNQNLIYPAGHNQMSGFGYAASVTMEKSFRDCSISTGGSSFGWAKGGMTDHHLSRHPYPHTSPYAIYNQRKSINSDEYHELLASSTSDHHEHGDNRGPEIETLPLFPMHGEDINYGFCHLNSAETDGWFNRDVGSGSRASLELSLNSYAGMDHT

SEQ ID NO: 102 - DNA, 840 bp, Gossypium hirsutum
atggaaccccagcaacagcaacagcaaaaccaacaagctccaaatgaggattgtggtggtggcagtggcaaaggaagctttctttgcaggcaaagtagtacacggtggactcctaccactgaccagattagaatattgaaggacctttactacaacaatggagttaggtccccgagtgctgatcagattcaaaggatctctgctagacttagacagtacggaaaaatcgaaggcaagaatgtcttttattggtttcagaaccacaaggctcgtgagaggcagaagaaaaggttcaccaccacgactaatcatcatgtccccatgcaaagccctaccactgctgcaaataacaagtatcccaacataactcctggttattctcctacatctctttcttcaactggtgctcttactgttgggcagataggaaactatggctatgggtctataactatggaaaagagttttagggattgctcaatatcagcatgtggtagtagtacaagtgtaggcgaatccctgagtcacaactttggatgggttgggttcgatcctacttattcttcgtcctacacattctttgagcacaaaaaattcatggaagagagacaaaaagatgaagatgatgcagaagaagaagctgctgctccacaaattgagaccctccctctctttcccatgcacagtgaagacgctaatggtttttgcagtaatattaggcccagactagacagctgctactctgggtggtacaggtctgaagatggctacactggttctcgtgcctcacttgagctcagcctcaacccatatgcaggcagaccgcaagattctatctga

SEQ ID NO: 103 - protein, 279 aa, Gossypium hirsutum
MEPQQQQQQNQQAPNEDCGGGSGKGSFLCRQSSTRWTPTTDQIRILKDLYYNNGVRSPSADQIQRISARLRQYGKIEGKNVFYWFQNHKARERQKKRFTTTTNHHVPMQSPTTAANNKYPNITPGYSPTSLSSTGALTVGQIGNYGYGSITMEKSFRDCSISACGSSTSVGESLSHNFGWVGFDPTYSSSYTFFEHKKFMEERQKDEDDAEEEAAAPQIETLPLFPMHSEDANGFCSNIRPRLDSCYSGWYRSEDGYTGSRASLELSLNPYAGRPQDSI

SEQ ID NO: 104 - DNA, 969 bp, Zostera marina
atggaacatcatcatcagcagcagttccacggtggccagccgcagctgatgagtgaaaatgaagagatgaacaacaatgggagcgggggtgggagtagtaagagcagttttctttgcagacagtcgagcacaaggtggatacccactactgatcagataaggatactgaaggatctatactacaacagtggactgagatccccaaacgccgatcagatccaaagaatatccgccagactgaggcagtacggaaagatcgagggtaagaatgttttctactggtttcaaaatcacaaagcccgagagaggcagaagaagagactcaccgtcgatattgctgcagcggcaactaccaacaaattctccaacaacactaatatgtcttcttcttcttctccctcagggatttctcctgcttctcatgcagtgtatgcaggattagggcagatggggagcaatggcggtggatcagtcgtgatggagagaacttcttacatggagtgttccttgccaggtgggatgccgatgcccgtacctgaacccaatgtgggagtcggagtgggatgggtgagtgttgaaacaggagctactactatgcaacaattctactaccatcaacagagaccaaccacaccctttcctgctcctcatcatcaccaccattactacgacgacggttactattccaataataacaaacttcaagcccatcacctacatatacgcgaggaaaatcaacatccagaagatgacgacgaagaagaagaagaagaagaagaagatgaagagatagaaacacttccattgttcccaatccactcacaggagacacagtcttacttcctggaccaacaacatgcaatccacaatcaagaaagcaataacatggaaacctctttggagctcaccctaaactcctactatgctgcttccagtagcagtactccacatggatcagagcatgattaa

SEQ ID NO: 105 - protein, 322 aa, Zostera marina
MEHHHQQQFHGGQPQLMSENEEMNNNGSGGGSSKSSFLCRQSSTRWIPTTDQIRILKDLYYNSGLRSPNADQIQRISARLRQYGKIEGKNVFYWFQNHKARERQKKRLTVDIAAAATTNKFSNNTNMSSSSSPSGISPASHAVYAGLGQMGSNGGGSVVMERTSYMECSLPGGMPMPVPEPNVGVGVGWVSVETGATTMQQFYYHQQRPTTPFPAPHHHHHYYDDGYYSNNNKLQAHHLHIREENQHPEDDDEEEEEEEEDEEIETLPLFPIHSQETQSYFLDQQHAIHNQESNNMETSLELTLNSYYAASSSSTPHGSEHD

SEQ ID NO: 106 - DNA, 693 bp, Amborella trichopoda
atggatcattctgataactgcccaggtaacaacaacaactctggttctggttctggttctggaaccaagtctggttacatgtgcagacaatctaactctagatggatcccaaccgctgaacaaatcagaatccttagagaactttactactctaacggtgttagatctccaaccgctgaacaaatccaaagaatctctgctagacttagacaatacggtaagatcgaaggtaagaacgttttttactggtttcaaaaccataaggctagagaaagacaaaagaagagacttaccgttgatcttgctgttcaaagagctgctgctacctctggtggtcttccaccaggtgttcttaacgtttctcatatcgctggttctacctgcggttctgttcttatggaatcttctcttatggattgctgctctacctctgctcttgaaaaccataacggtagaaaggaaagagctaacggtgatatgatcgttgaaagagaaagatctgctccaggtaaggaaacccttcaactttttccaatgcatcattctccacaaaacgatgataccatcgctgatgattacttttttaacgatgaagaagaaaagccagtttgcatggcttctcttgaacttacccttaactcttttgatagagtttaccatccagattctgattttagatctcattcttcttaa

SEQ ID NO: 107 - protein, 230 aa, Amborella trichopoda
MDHSDNCPGNNNNSGSGSGSGTKSGYMCRQSNSRWIPTAEQIRILRELYYSNGVRSPTAEQIQRISARLRQYGKIEGKNVFYWFQNHKARERQKKRLTVDLAVQRAAATSGGLPPGVLNVSHIAGSTCGSVLMESSLMDCCSTSALENHNGRKERANGDMIVERERSAPGKETLQLFPMHHSPQNDDTIADDYFFNDEEEKPVCMASLELTLNSFDRVYHPDSDFRSHSS

SEQ ID NO: 108 - DNA, 834 bp, Aquilegia coerulea
atggaacctcaacaagatcccaataaccaacaacaacaacttcaacaacaacaacatgaagaaaacagcagtggaagtagtagcaaaagcagttttctttgcaggcaaactagtacaaggtggacacccacaagtgatcagataagaatcttgaaagacctttactacaacaatggagttaggtctccaagtgcagagcaaatacagagaatctcagcaaggttaaggcagtacggtaagattgaaggcaagaatgttttctattggtttcagaaccacaaagctcgtgagagacaaaagaagagattcacaaatgatacaacaaccatgtccatgcaaagagctactactgcaactggtcatgccaaatacattactacttctcctgggatttcatctccatcttctgctggtgtacttggtgttggacagatgggaagcaacatgggatatggatctgttgttatggagaagagttttagagactgttcaatatctcctgctgctggtggtggtggtggtggtggcagtaatatgggtggatatggatccatgaacaacaattttggttggattggtgcgggtgtcgagccatatccatttttcaacaagacaaagcatattcaaaaatatgaagaagaagatttctcccaaactgagattgaaacactaccactatttcccatgcatggtgaagacagtacaaggtttggttcatctggcaacccaaacccgaattggaactggtttcgaacaggagatgaaatgattggatctagaacatcattggagcttagcttgaattcttactctggcgggtcaattaataactga

SEQ ID NO: 109 - protein, 277 aa, Aquilegia coerulea
MEPQQDPNNQQQQLQQQQHEENSSGSSSKSSFLCRQTSTRWTPTSDQIRILKDLYYNNGVRSPSAEQIQRISARLRQYGKIEGKNVFYWFQNHKARERQKKRFTNDTTTMSMQRATTATGHAKYITTSPGISSPSSAGVLGVGQMGSNMGYGSVVMEKSFRDCSISPAAGGGGGGGSNMGGYGSMNNNFGWIGAGVEPYPFFNKTKHIQKYEEEDFSQTEIETLPLFPMHGEDSTRFGSSGNPNPNWNWFRTGDEMIGSRTSLELSLNSYSGGSINN

SEQ ID NO: 110 - DNA, 969 bp, Amaranthus hypochondriacus
atggagtttcaacaacaacaagatgaagagatgataaaccatgttgggaaaatgagcaacaacacaagtaacaataataataataataataactatttatgtagacaaagtagcacaagatggactccaacaacagaacaaataaagcttttaaaagatctttattatttacaaggaattagatctcctactgctgatcaaattcaaagcatttgtgctaggttacgtcgttatggaaaaattgaaggcaaaaatgttttttattggtttcaaaatcataaggctagggaaagacaaaaaaagaagcttactcctacttctcctaataataataataataataataataataatttcataagaaataataataataataataataatggaaatattaacacttttcatgctaaatatccttgttccttcaataataatcccggggtttcttgttcaagttcaccagcaggtgtgatttctggaggtgggcaattgatggggagttttgggtatggagctgtgactatggagactaaatttagggtaagaggaggtattcctattccaaatggagcaaatcaatggagtaactatttcaacccaaacaatccaacatcttactcaaatttctttattgacaaggtatcatcaaatgttgatcatcattatccatacattaaccatcatgatcatgatcatgatcatgatcatcatgatcatgatcattatggcccacaatcacctcatgagattcagactcttcctctctttcccatgcacaatgatcatcatgatctcgatctcgatctcgatctcgatcacgatcaagggttctacacctataagcctcaatcggacggctgtaattataccggaggatatcgatggtcatctaatgttaatggtggacatacttctcttgagcttagtcttaactcttatggatttggatgctattcacctaattaa

SEQ ID NO: 111 - protein, 322 aa, Amaranthus hypochondriacus
MEFQQQQDEEMINHVGKMSNNTSNNNNNNNNYLCRQSSTRWTPTTEQIKLLKDLYYLQGIRSPTADQIQSICARLRRYGKIEGKNVFYWFQNHKARERQKKKLTPTSPNNNNNNNNNNFIRNNNNNNNNGNINTFHAKYPCSFNNNPGVSCSSSPAGVISGGGQLMGSFGYGAVTMETKFRVRGGIPIPNGANQWSNYFNPNNPTSYSNFFIDKVSSNVDHHYPYINHHDHDHDHDHHDHDHYGPQSPHEIQTLPLFPMHNDHHDLDLDLDLDHDQGFYTYKPQSDGCNYTGGYRWSSNVNGGHTSLELSLNSYGFGCYSPN

SEQ ID NO: 112 - DNA, 924 bp, Cucumis sativus
atggaacatcctgccaaacaacaacaacaagaacaaggaattaatgatcaaggtggtgaaggtggtggtggaagcaatggaaaaggtgggtttttgtgtaggcaaagtagcagtcgatggactccaacaactgaccaaatacgaatattgaaagagctttattataacaatggtgttcgctccccaagcgctgatcaaattcagaggatctctgctaggcttagacagtacggtaaaatcgaaggcaaaaacgttttttattggtttcaaaaccataaggctcgtgaaagacagaagaaaagattcacttcaaattctacttctcctattactacctccaatactactacaactactactgattttaaaatttcttcaactaataataatattaactggaagtctgaagatcattcctcctcttctcataacaaatttcctccaggaataacaattgctttaattgattcttgtttttgcagctccttcttcttcggttatggtcgccgttggccatatgggaaattacggatatgggagtgttcaatatcgtcgggaggaaatagcagtgtcgtcggttaccggagccacaacatgggatcatggatcggtatcgatccgtattcttctccggcagctgccgcggcggggggatcagccaatgtgtttgaaaaaacaaaatatgttgaagaaagcatggaagatcacgaggagcaagagatcgaaactctcccccttttccccattcatggtgaccggaataatctcggtggtttctgcagcatgaagccggaatattcagagagctactacaccaccacttggtacgggcggtctgacgataatggagccgccggttctcgggcttcgctggaactcagcctcaactcttacgccaccatctcacctgatgatggaatgtga

SEQ ID NO: 113 - protein, 307 aa, Cucumis sativus
MEHPAKQQQQEQGINDQGGEGGGGSNGKGGFLCRQSSSRWTPTTDQIRILKELYYNNGVRSPSADQIQRISARLRQYGKIEGKNVFYWFQNHKARERQKKRFTSNSTSPITTSNTTTTTTDFKISSTNNNINWKSEDHSSSSHNKFPPGITIALIDSCFCSSFFFGYGRRWPYGKLRIWECSISSGGNSSVVGYRSHNMGSWIGIDPYSSPAAAAAGGSANVFEKTKYVEESMEDHEEQEIETLPLFPIHGDRNNLGGFCSMKPEYSESYYTTTWYGRSDDNGAAGSRASLELSLNSYATISPDDGM

SEQ ID NO: 114 - DNA, 840 bp, Pinus taeda
atggaatctgctgaaagaatcggttcttacgatgtttacagacaaccatcttctaccagatggaacccaacctctgaacaactttctatccttagagaactttactacaccaacggtatcagatctccaaccgttgatgaaatccatagaatctctatgaagctttctagatacggtaagatcgaaggtaagaacgttttttactggtttcaaaaccataaggctagacatagacaaaagaccagactttctgctatgaacgttggtaagccagctgcttctccagctctttctcaaaccaccagaaagcataagcaatgctacatcaccaccaacatcgttcttacccttaaccaacattgctacaccaagaccaacatggttcttcaaatcatctggtctcttggtcttggtaacaagtctcaaaccaccaagatggtttgggaaatcaagatcaccgcttttccaaccatccataccgaatctttttacgaaaacagaatggctggtgaaaactcttcttgcaaggaagctgcttgctgctctcttgaacaaatgtacgctgttaagcatcatgatgttatgaaggctatggaagaaaaccaacttcaagaaggtaagatcaacagacatgttgaaacccttgaactttttccaacccattgcgaagatagatctccagaaccatctgaaaagaagtcttgctgctggggttcttgcgaaaccaaggaaaaccataacaacaacccaccaggtggttacaagggtaagcaaagagattctgttcttgatctttgcctttctcttggtaacaagtcttgcggtcttcatgataactaa

SEQ ID NO: 115 - protein, 279 aa, Pinus taeda
MESAERIGSYDVYRQPSSTRWNPTSEQLSILRELYYTNGIRSPTVDEIHRISMKLSRYGKIEGKNVFYWFQNHKARHRQKTRLSAMNVGKPAASPALSQTTRKHKQCYITTNIVLTLNQHCYTKTNMVLQIIWSLGLGNKSQTTKMVWEIKITAFPTIHTESFYENRMAGENSSCKEAACCSLEQMYAVKHHDVMKAMEENQLQEGKINRHVETLELFPTHCEDRSPEPSEKKSCCWGSCETKENHNNNPPGGYKGKQRDSVLDLCLSLGNKSCGLHDN

1. A plant transformed with a recombinant expression cassette comprising a marker gene cassette comprising a DNA sequence imparting spectinomycin resistance or streptomycin resistance in plants, wherein the DNA sequence comprises a nucleotide sequence selected from the group consisting of:
(a) at least one of SEQ ID NO: 9, SEQ ID NO: 11, SEQ ID NO: 13, SEQ ID NO: 15, SEQ ID NO: 21 and SEQ ID NO: 23, wherein the nucleotide sequence imparts spectinomycin resistance or streptomycin resistance in plants;
(b) a nucleotide sequence that is at least 95% identical to at least one of SEQ ID NO: 9, SEQ ID NO: 11, SEQ ID NO: 13, SEQ ID NO: 15, SEQ ID NO: 21 and SEQ ID NO: 23, wherein the nucleotide sequence imparts spectinomycin resistance or streptomycin resistance in plants;
(c) a nucleotide sequence that is at least 70% identical to at least one of SEQ ID NO: 9, SEQ ID NO: 11, SEQ ID NO: 13, SEQ ID NO: 15, SEQ ID NO: 21 and SEQ ID NO: 23, wherein the nucleotide sequence imparts spectinomycin resistance or streptomycin resistance in plants;
(d) a nucleotide sequence encoding a polypeptide of at least one of SEQ ID NO: 10, SEQ ID NO: 12, SEQ ID NO: 14, SEQ ID NO: 16, SEQ ID NO: 22, and SEQ ID NO: 24, wherein the nucleotide sequence imparts spectinomycin resistance or streptomycin resistance in plants;
(e) a nucleotide sequence encoding a polypeptide that is at least 95% identical to at least one of SEQ ID NO: 10, SEQ ID NO: 12, SEQ ID NO: 14, SEQ ID NO: 16, SEQ ID NO: 22, and SEQ ID NO: 24, wherein the nucleotide sequence imparts spectinomycin resistance or streptomycin resistance in plants; and
(f) a nucleotide sequence encoding a polypeptide that is at least 70% identical to at least one of SEQ ID NO: 10, SEQ ID NO: 12, SEQ ID NO: 14, SEQ ID NO: 16, SEQ ID NO: 22, and SEQ ID NO: 24, wherein the nucleotide sequence imparts spectinomycin resistance or streptomycin resistance in plants.

2. The plant of claim 1, wherein the recombinant expression cassette further comprises a trait gene cassette comprising a heterologous nucleotide sequence of interest.

3. The plant of claim 2, wherein the heterologous nucleotide sequence of interest comprises a trait gene encoding a gene product conferring nutritional enhancement, pest resistance, herbicide resistance, abiotic stress tolerance, increased yield, drought resistance, cold tolerance, pathogen resistance, insect resistance, nitrogen use efficiency (NUE), disease resistance, or an ability to alter a metabolic pathway.

4. The plant of claim 2, wherein the recombinant expression cassette further comprises a morphogenic gene cassette comprising a morphogenic gene.

5. The plant of claim 4, wherein the morphogenic gene comprises:
(i) a nucleotide sequence encoding a WUS/WOX homeobox polypeptide; or
(ii) a nucleotide sequence encoding a Babyboom (BBM) polypeptide or an Ovule Development Protein 2 (ODP2) polypeptide; or
(iii) a combination of (i) and (ii).

6. The plant of claim 5, wherein the morphogenic gene comprises the nucleotide sequence encoding the WUS/WOX homeobox polypeptide.

7. The plant of claim 6, wherein the nucleotide sequence encoding the WUS/WOX homeobox polypeptide is selected from WUS1, WUS2, WUS3, WOX2A, WOX4, WOX5, and WOX9.

8. The plant of claim 5, wherein the morphogenic gene comprises a nucleotide sequence encoding the Babyboom (BBM) polypeptide or the Ovule Development Protein 2 (ODP2) polypeptide.

9. The plant of claim 8, wherein the nucleotide sequence encoding the Babyboom (BBM) polypeptide is selected from BBM2, BMN2, and BMN3 or the Ovule Development Protein 2 (ODP2) polypeptide is ODP2.

10. The plant of claim 5, wherein the morphogenic gene comprises a nucleotide sequence encoding the WUS/WOX homeobox polypeptide and the Babyboom (BBM) polypeptide or the Ovule Development Protein 2 (ODP2) polypeptide.

11. The plant of claim 10, wherein the nucleotide sequence encoding the WUS/WOX homeobox polypeptide is selected from WUS1, WUS2, WUS3, WOX2A, WOX4, WOX5, and WOX9 and the Babyboom (BBM) polypeptide is selected from BBM2, BMN2, and BMN3 or the Ovule Development Protein 2 (ODP2) polypeptide is ODP2.

12. The plant of claim 4, wherein the recombinant expression cassette further comprises a site-specific recombinase cassette comprising a nucleotide sequence encoding a site-specific recombinase selected from FLP, Cre, SSV1, lambda Int, phi C31 Int, HK022, R, Gin, Tn1721, CinH, ParA, Tn5053, Bxbl, TP907-1, or U153.

13. The plant of claim 12, wherein the site-specific recombinase is operably linked to a constitutive promoter, an inducible promoter, or a developmentally regulated promoter.

14. The plant of claim 13, wherein the constitutive promoter is selected from UBI, LLDAV, EVCV, DMMV, BSV(AY) PRO, CYMV PRO FL, UBIZM PRO, SI-UB3 PRO, SB-UBI PRO (ALT1), USB1ZM PRO, ZM-GOS2 PRO, ZM-H1B PRO (1.2 KB), IN2-2, NOS, the −135 version of 35S, or ZM-ADF PRO (ALT2);
the inducible promoter is selected from AXIG1, DR5, XVE, GLB1, OLE, LTP2, HSP17.7, HSP26, HSP18A, AT-HSP811, AT-HSP811L, GM-HSP173B or promoters activated by tetracycline, ethamethsulfuron or chlorsulfuron; and
the developmentally regulated promoter is selected from PLTP, PLTP1, PLTP2, PLTP3, SDR, LGL, LEA-14A, or LEA-D34.

15. The plant of claim 4, wherein the morphogenic gene is operably linked to a constitutive promoter, an inducible promoter, or a developmentally regulated promoter.

16. The plant cell of claim 15, wherein the constitutive promoter is selected from UBI, LLDAV, EVCV, DMMV, BSV(AY) PRO, CYMV PRO FL, UBIZM PRO, SI-UB3 PRO, SB-UBI PRO (ALT1), USB1ZM PRO, ZM-GOS2 PRO, ZM-H1B PRO (1.2 KB), IN2-2, NOS, the −135 version of 35S, or ZM-ADF PRO (ALT2);
the inducible promoter is selected from AXIG1, DR5, XVE, GLB1, OLE, LTP2, HSP17.7, HSP26, HSP18A, AT-HSP811, AT-HSP811L, GM-HSP173B or promoters activated by tetracycline, ethamethsulfuron or chlorsulfuron; and
the developmentally regulated promoter is selected from PLTP, PLTP1, PLTP2, PLTP3, SDR, LGL, LEA-14A, or LEA-D34.

17. The plant of claim 1, wherein the plant is a monocot or a dicot.

18. A seed from the plant of claim 2, wherein the seed comprises the trait gene cassette and not the marker gene cassette.

19. A seed from the plant of claim 4, wherein the seed comprises the trait gene cassette and not the marker gene cassette or the morphogenic gene cassette.

20. A seed from the plant of claim 12, wherein the seed comprises the trait gene cassette and not the marker gene cassette or the morphogenic gene cassette or the site-specific recombinase cassette.

21. A method of producing a transgenic plant expressing a trait gene cassette comprising:
transforming a plant cell with a recombinant expression cassette comprising a trait gene cassette and a marker gene cassette, the marker gene cassette comprising a DNA sequence imparting spectinomycin resistance or streptomycin resistance in plants, wherein the DNA sequence comprises a nucleotide sequence selected from the group consisting of:
(a) at least one of SEQ ID NO: 9, SEQ ID NO: 11, SEQ ID NO: 13, SEQ ID NO: 15, SEQ ID NO: 21 and SEQ ID NO: 23, wherein the nucleotide sequence imparts spectinomycin resistance or streptomycin resistance in plants;
(b) a nucleotide sequence that is at least 95% identical to at least one of SEQ ID NO: 9, SEQ ID NO: 11, SEQ ID NO: 13, SEQ ID NO: 15, SEQ ID NO: 21 and SEQ ID NO: 23, wherein the nucleotide sequence imparts spectinomycin resistance or streptomycin resistance in plants;
(c) a nucleotide sequence that is at least 70% identical to at least one of SEQ ID NO: 9, SEQ ID NO: 11, SEQ ID NO: 13, SEQ ID NO: 15, SEQ ID NO: 21 and SEQ ID NO: 23, wherein the nucleotide sequence imparts spectinomycin resistance or streptomycin resistance in plants;
(d) a nucleotide sequence encoding a polypeptide of at least one of SEQ ID NO: 10, SEQ ID NO: 12, SEQ ID NO: 14, SEQ ID NO: 16, SEQ ID NO: 22, and SEQ ID NO: 24, wherein the nucleotide sequence imparts spectinomycin resistance or streptomycin resistance in plants;
(e) a nucleotide sequence encoding a polypeptide that is at least 95% identical to at least one of SEQ ID NO: 10, SEQ ID NO: 12, SEQ ID NO: 14, SEQ ID NO: 16, SEQ ID NO: 22, and SEQ ID NO: 24, wherein the nucleotide sequence imparts spectinomycin resistance or streptomycin resistance in plants; and
(f) a nucleotide sequence encoding a polypeptide that is at least 70% identical to at least one of SEQ ID NO: 10, SEQ ID NO: 12, SEQ ID NO: 14, SEQ ID NO: 16, SEQ ID NO: 22, and SEQ ID NO: 24, wherein the nucleotide sequence imparts spectinomycin resistance or streptomycin resistance in plants;
selecting a spectinomycin resistant or a streptomycin resistant transgenic plant cell; and
regenerating the transgenic plant expressing the trait gene cassette.

22. The method of claim 21, wherein the trait gene cassette comprises a heterologous nucleotide sequence of interest.

23. The method of claim 22, wherein the heterologous nucleotide sequence of interest comprises a trait gene encoding a gene product conferring nutritional enhancement, pest resistance, herbicide resistance, abiotic stress tolerance, increased yield, drought resistance, cold tolerance, pathogen resistance, insect resistance, nitrogen use efficiency (NUE), disease resistance, or an ability to alter a metabolic pathway.

24. The method of claim 21, wherein the recombinant expression cassette further comprises a morphogenic gene cassette.

25. The method of claim 24, wherein the morphogenic gene cassette comprises a morphogenic gene.

26. The method of claim 25, wherein the morphogenic gene comprises:
(i) a nucleotide sequence encoding a WUS/WOX homeobox polypeptide; or
(ii) a nucleotide sequence encoding a Babyboom (BBM) polypeptide or an Ovule Development Protein 2 (ODP2) polypeptide; or
(iii) a combination of (i) and (ii).

27. The method of claim 26, wherein the morphogenic gene comprises a nucleotide sequence encoding the WUS/WOX homeobox polypeptide.

28. The method of claim 27, wherein the nucleotide sequence encoding the WUS/WOX homeobox polypeptide is selected from WUS1, WUS2, WUS3, WOX2A, WOX4, WOX5, and WOX9.

29. The method of claim 26, wherein the morphogenic gene comprises a nucleotide sequence encoding the Babyboom (BBM) polypeptide or the Ovule Development Protein 2 (ODP2) polypeptide.

30. The method of claim 29, wherein the nucleotide sequence encoding the Babyboom (BBM) polypeptide is selected from BBM2, BMN2, and BMN3 or the Ovule Development Protein 2 (ODP2) polypeptide is ODP2.

31. The method of claim 26, wherein the morphogenic gene comprises a nucleotide sequence encoding the WUS/WOX homeobox polypeptide and the Babyboom (BBM) polypeptide or the Ovule Development Protein 2 (ODP2) polypeptide.

32. The method of claim 31, wherein the nucleotide sequence encoding the WUS/WOX homeobox polypeptide is selected from WUS1, WUS2, WUS3, WOX2A, WOX4, WOX5, and WOX9 and the Babyboom (BBM) polypeptide is selected from BBM2, BMN2, and BMN3 or the Ovule Development Protein 2 (ODP2) polypeptide is ODP2.

33. The method of claim 24, wherein the recombinant expression cassette further comprises a site-specific recombinase cassette.

34. The method of claim 33, wherein the site-specific recombinase cassette comprises a nucleotide sequence encoding a site-specific recombinase selected from FLP, Cre, SSV1, lambda Int, phi C31 Int, HK022, R, Gin, Tn1721, CinH, ParA, Tn5053, Bxb1, TP907-1, or U153.

35. The method of claim 34, wherein the nucleotide sequence encoding the site-specific recombinase is operably linked to a constitutive promoter, an inducible promoter, or a developmentally regulated promoter.

36. The method of claim 35, wherein the constitutive promoter is selected from UBI, LLDAV, EVCV, DMMV, BSV(AY) PRO, CYMV PRO FL, UBIZM PRO, SI-UB3 PRO, SB-UBI PRO (ALT1), USB1ZM PRO, ZM-GOS2 PRO, ZM-H1B PRO (1.2 KB), IN2-2, NOS, the −135 version of 35S, or ZM-ADF PRO (ALT2);
the inducible promoter is selected from AXIG1, DR5, XVE, GLB1, OLE, LTP2, HSP17.7, HSP26, HSP18A, AT-HSP811, AT-HSP811L, GM-HSP173B or promoters activated by tetracycline, ethamethsulfuron or chlorsulfuron; and
the developmentally regulated promoter is selected from PLTP, PLTP1, PLTP2, PLTP3, SDR, LGL, LEA-14A, or LEA-D34.

37. The method of claim 25, wherein the morphogenic gene is operably linked to a constitutive promoter, an inducible promoter, or a developmentally regulated promoter.

38. The method of claim 37, wherein the constitutive promoter is selected from UBI, LLDAV, EVCV, DMMV, BSV(AY) PRO, CYMV PRO FL, UBIZM PRO, SI-UB3 PRO, SB-UBI PRO (ALT1), USB1ZM PRO, ZM-GOS2 PRO, ZM-H1B PRO (1.2 KB), IN2-2, NOS, the −135 version of 35S, or ZM-ADF PRO (ALT2);
the inducible promoter is selected from AXIG1, DR5, XVE, GLB1, OLE, LTP2, HSP17.7, HSP26, HSP18A, AT-HSP811, AT-HSP811L, GM-HSP173B or promoters activated by tetracycline, ethamethsulfuron or chlorsulfuron; and
the developmentally regulated promoter is selected from PLTP, PLTP1, PLTP2, PLTP3, SDR, LGL, LEA-14A, or LEA-D34.

39. The method of claim 21, further comprising excising or segregating away the marker gene cassette from the transgenic plant expressing the trait gene cassette.

40. The method of claim 24, further comprising excising or segregating away the marker gene cassette and the morphogenic gene cassette from the transgenic plant expressing the trait gene cassette.

41. The method of claim 33, further comprising excising or segregating away the marker gene cassette, the morphogenic gene cassette, and the site-specific recombinase cassette from the transgenic plant expressing the trait gene cassette.

42. The method of claim 21, wherein the plant cell is a monocot or a dicot.

43. A seed from the transgenic plant of claim 21.

44. A seed of the transgenic plant produced by the method of claim 21, wherein the seed comprises the trait gene cassette and not the marker gene cassette.

45. A seed of the transgenic plant produced by the method of claim 24, wherein the seed comprises the trait gene cassette and not the marker gene cassette or the morphogenic gene cassette.

46. A seed of the transgenic plant produced by the method of claim 33, wherein the seed comprises the trait gene cassette and not the marker gene cassette or the morphogenic gene cassette or the site-specific recombinase cassette.

47. The method of any one of claim 21, wherein the recombinant expression cassette resides in a disarmed Agrobacteria, an Ochrobactrum bacteria or a Rhizobiaceae bacteria.

48. The method of claim 47, wherein the disarmed Agrobacteria is selected from the group of AGL-1, EHA105, GV3101, LBA4404, and LBA4404 THY-.

49. The method of claim 47, wherein the Ochrobactrum bacteria is selected from Table 2.

50. The method of claim 47, wherein the Rhizobiaceae bacteria is selected from Table 3.

51. The method of claim 24, wherein the recombinant expression cassette resides in a disarmed Agrobacteria, an Ochrobactrum bacteria or a Rhizobiaceae bacteria.

52. The method of 33, wherein the recombinant expression cassette resides in a disarmed Agrobacteria, an Ochrobactrum bacteria or a Rhizobiaceae bacteria.
